(19) United States
(12) Patent Application Publication
(10) Pub. No.: US 2010/0035803 A1
(43) Pub. Date: Feb. 11, 2010

(54) Polypeptides and Polynucleotides Encoding the same

(75) Inventors: Elie Khalil, Victoria (AU); Matthew R. Digby, Victoria (AU); Kevin Roy Nicholas, Victoria (AU); Christophe M. Lefevre, Victoria (AU); Yvan Strahm, Vancouver (CA)

Correspondence Address: SCHWEGMAN, LUNDBERG & WOESSNER, P.A., P.O. BOX 2938, MINNEAPOLIS, MN, 55402, US

(73) Assignee: Dairy Australia Limited, Southbank ,Victoria (AU)

(21) Appl. No.: 12/227,413

(22) PCT Filed: May 17, 2007
(86) PCT No.: PCT/AU2007/000671

§ 371 Date: Sep. 25, 2009

(30) Foreign Application Priority Data
May 17, 2006 (AU) 2006902639

(51) Int. Cl. A61K 38/16; C07K 14/435; C12N 5/10

(52) U.S. Cl. 514/12; 530/350; 435/369

(57) ABSTRACT

Provided herein are lactation-associated polypeptides and polynucleotides, expression vectors a host cells for expressing lactation-associated polypeptides and polynucleotides, and methods of producing said polypeptides and polynucleotides.

### TECHNICAL FIELD

[0001] The present invention relates generally to polypeptides the expression of which is altered during lactation in mammals. The invention also relates to polynucleotides encoding the same and to uses of these polypeptides and polynucleotides.

### CROSS REFERENCE TO RELATED APPLICATION(S)

[0002] This application claims the benefit of Australian Provisional Patent Application No. 2006902639 which is herein incorporated by reference in its entirety.

### BACKGROUND OF THE INVENTION

[0003] Mammalian milk is composed primarily of proteins, sugars, lipids and a variety of trace minerals and vitamins. Milk proteins not only provide nutrition for the developing offspring, but a complex range of biological activities tailored to age-specific needs of the offspring.

[0004] It is well recognized that milk composition changes during lactation, the most striking change being that from colostrum to milk shortly after parturition in most mammals. However a variety of other changes in milk composition occur throughout lactation. The extent and full biological significance of the changes is presently unknown although it is accepted that milk composition alterations at least in part reflect the changing needs of the offspring through stages of development and/or regulate such developmental changes.

[0005] The major protein constituents of milk are the casein proteins, α-casein and βcasein, α-lactalbumin and β-lactoglobulin. Milk also contains significant antimicrobial and immune-response mediators. Well known constituents include antibodies, lysozyme, lactoferrin complement proteins C3/C4, defensins, and interleukins including IL-1, IL-10 and IL-12. In addition to these a vast array of other proteins are also present in milk, many of which remain to be identified and characterized. A significant number of these uncharacterized proteins are likely to play a regulatory role and/or contribute to the development or protection of the offspring, for example by providing antimicrobial activities, anti-inflammatory activities or by boosting the immune system of the offspring. There is a clear need to elucidate the identities and activities of such proteins.

[0006] Marsupials have a number of unique features in their modes of reproduction and lactation which make them excellent model organisms for the study of changes in milk composition, and specifically milk proteins. Lactation in marsupials has been studied extensively; one of most widely studied marsupials being the tammar wallaby (Macropus eugenii). The lactation cycle in the tammar wallaby can be divided into 4 phases, phase 1, phase 2A, phase 2B and phase 4 (see Nicholas et al., 1997, J Mammary Gland Biol Neoplasia 2: 299-310). The transition from one phase to the next correlates with significant alterations in milk composition, in particular in milk protein concentrations. Milk composition is specifically matched for the developmental stage of the offspring. Macropodids such as the tammar wallaby are capable of concurrent asynchronous lactation whereby individual teats produce milk with different compositions for pouch young of different ages. As such lactation can be independently regulated locally rather than systemically, determining the rate of growth and development of the young irrespective of the age of the young (Nicholas et al., 1997; Trott et al., 2003, Biol Reprod 68:929-936). Additionally, marsupial young are altricial and thus totally dependent on maternal milk in the early stages of life. For example, tammar wallaby pouch young have no immune system of their own for approximately the first 70 days and depend entirely on the protection offered by maternal milk. The above features, inter alia, make marsupials excellent experimental model organisms for the investigation of regulatory and bioactive proteins in milk.

[0007] Further, with the rapid progress of comparative gene mapping techniques and genome sequencing technology, genetic studies in marsupials have already proven instrumental in the identification of novel genes in other species. For example, studies in the tammar wallaby led to the discovery of a candidate gene for mental retardation, RBMX, in humans (Delbridge et al., 1999, Nat Genet 22: 223-224).

[0008] The present invention is predicated on the inventors' use of the tammar wallaby as a model system for the identification of lactation-associated polypeptides secreted in mammalian milk.

### SUMMARY OF THE INVENTION

[0009] In a first aspect, the present invention provides a lactation-associated polypeptide comprising an amino acid sequence selected from the group consisting of SEQ ID NOs: 2, 4, 6, 8, 10, 12, 14, 16, 18, 20, 22, 24, 26, 28, 30, 32, 34, 36, 38, 40, 42, 44, 46, 48, 50, 52, 54, 56, 58, 60, 62, 64, 66, 68, 70, 72, 74, 76, 78, 80, 82, 84, 86, 88, 90, 92, 94, 96, 98, 100, 102, 104, 106, 108, 110, 112, 114, 116, 118, 120, 122, 124, 126, 128, 130, 132, 134, 136, 138, 140, 142, 144, 146, 148, 150, 152, 154, 156, 158, 160, 162, 164, 166, 168, 170, 172, 174, 176, 178, 180, 182, 184, 186, 188, 190, 192, 194, 196, 198, 200, 202, 204, 206, 208, 210, 212, 214, 216, 218, 220, 222, 224, 226, 228, 230, 232, 234, 236, 238, 240, 242, 244, 246, 248, 250, 252, 254, 256, 258, 260, 262, 264, 266, 268, 270, 272, 274, 276, 278, 280, 282, 284, 286, 288, 290, 292, 294, 296, 298, 300, 302, 304, 306, 308, 310, 312, 314, 316, 318, 320, 322, 324, 326, 328, 330, 332, 334, 336, 338, 340, 342, 344, 346, 348, 350, 352, 354, 356, 358, 360, 362, 364, 366, 368, 370, 372, 374, 376, 378, 380, 382, 384, 386, 388, 390, 392, 394, 396, 398, 400, 402, 404, 406, 408, 410, 412, 414, 416, 418, 420, 422, 424, 426, 428, 430, 432, 434, 436, 438, 440, 442, 444, 446, 448, 450 and 452, or variant thereof.

[0010] The polypeptide may be a secreted polypeptide.

[0011] In a second aspect of the invention there is provided a polynucleotide encoding a polypeptide of the first aspect.

[0012] A third aspect of the invention provides a lactation-associated polynucleotide comprising a nucleotide sequence selected from the group consisting of SEQ ID NOs: 1, 3, 5, 7, 9, 11, 13, 15, 17, 19, 21, 23, 25, 27, 29, 31, 33, 35, 37, 39, 41, 43, 45, 47, 49, 51, 53, 55, 57, 59, 61, 63, 65, 67, 69, 71, 73, 75, 77, 79, 81, 83, 85, 87, 89, 91, 93, 95, 97, 99, 101, 103, 105, 107, 109, 111, 113, 115, 117, 119, 121, 123, 125, 127, 129, 131, 133, 135, 137, 139, 141, 143, 145, 147, 149, 151, 153, 155, 157, 159, 161, 163, 165, 167, 169, 171, 173, 175, 177, 179, 181, 183, 185, 187, 189, 191, 193, 195, 197, 199, 201, 203, 205, 207, 209, 211, 213, 215, 217, 219, 221, 223, 225, 227, 229, 231, 233, 235, 237, 239, 241, 243, 245, 247, 249, 251, 253, 255, 257, 259, 261, 263, 265, 267, 269, 271, 273, 275, 277, 279, 281, 283, 285, 287, 289, 291, 293, 295, 297, 299, 301, 303, 305, 307, 309, 311, 313, 315, 317, 319, 321, 323, 325, 327, 329, 331, 333, 335, 337, 339, 341, 343, 345, 347, 349, 351, 353, 355, 357, 359, 361, 363, 365, 367, 369, 371, 373, 375, 377, 379, 381, 383, 385, 387, 389, 391, 393, 395, 397, 399, 401, 403, 405, 407, 409, 411, 413, 415, 417, 419, 421, 423, 425, 427, 429, 431, 433, 435, 437, 439, 441, 443, 445, 447, 449, 451 and 453 to 502, or variant thereof.

[0013] A fourth aspect of the invention provides polypeptides encoded by the polynucleotides of the third aspect.

[0014] A fifth aspect of the present invention provides an expression vector comprising a polynucleotide of the second or third aspect. The polynucleotide may be operably linked to a promoter.

[0015] A sixth aspect of the invention provides a host cell transformed with an expression vector of the fifth aspect.

[0016] A seventh aspect of the invention provides a method for isolating a bioactive molecule comprising the steps of:

[0017] (a) introducing into a suitable host cell a polynucleotide of the second or third aspect or expression vector of the fifth aspect;

[0018] (b) culturing the cell under conditions suitable for expression of a polypeptide encoded by the polynucleotide;

[0019] (c) recovering the polypeptide; and

[0020] (d) assaying the recovered polypeptide for biological activity.

[0021] An eighth aspect of the invention provides a method for isolating a bioactive molecule comprising the steps of:

[0022] (a) introducing into a suitable host cell a polynucleotide of the second or third aspect or expression vector of the fifth aspect;

[0023] (b) culturing the cell under conditions suitable for expression of a polypeptide encoded by the polynucleotide and for secretion of the polypeptide into the extra cellular medium;

[0024] (c) recovering the polypeptide; and

[0025] (d) assaying the recovered polypeptide for biological activity.

[0026] In embodiments of the seventh and eighth aspects, the assaying in step (d) may comprise assaying for anti-inflammatory, pro-inflammatory, anti-microbial, anti-apoptotic or cell proliferative activity. Polypeptides may also be assayed to determine their ability to influence the differentiation of embryonic stem cells or mammary epithelium, to stimulate transcription from the trefoil gene promoter, to stimulate transcription from the OCT4 gene promoter, to stimulate the expression of secreted proteins or influence mammary gland development, such as the mammary epithelium.

[0027] In a ninth aspect of the invention there is provided a bioactive molecule isolated according to the method of the seventh or eighth aspect.

[0028] According to a tenth aspect of the present invention there is provided a method of screening for compounds that modulate the expression or activity of polypeptides and/or polynucleotides of the invention, comprising:

[0029] (a) contacting a polypeptide of the first or fourth aspect or polynucleotide of the second or third aspect with a candidate compound under conditions suitable to enable interaction of the candidate compound to the polypeptide or the polynucleotide; and

[0030] (b) assaying for activity of the polypeptide or polynucleotide.

[0031] The modulation may be in the form of an inhibition of expression or activity or an activation or stimulation of expression or activity. Accordingly, the modulator compound may be an antagonist or agonist of the polypeptide or polynucleotide.

[0032] According to an eleventh aspect of the present invention there is provided a method for isolating lactation-associated polynucleotides in a eutherian mammalian species comprising:
[0033] (a) obtaining a biological sample from the eutherian mammalian species, the sample containing nucleic acid molecules;
[0034] (b) contacting the biological sample with one or more polynucleotides of the second or third aspect;
[0035] (c) detecting hybridization between nucleic acid molecules in the biological sample and the one or more polynucleotides; and
[0036] (d) isolating the hybridizing nucleic acid molecules.

[0037] The hybridization may occur and be detected through techniques that are standard and routine amongst those skilled in the art, including southern and northern hybridization, polymerase chain reaction and ligase chain reaction.

[0038] The hybridization may be conducted under conditions of low stringency. The hybridization may be conducted under conditions of medium or high stringency.

[0039] According to a twelfth aspect of the invention there is provided a lactation-associated polynucleotide isolated according to the method of the twelfth aspect.

[0040] According to a thirteenth aspect of the invention there is provided a polypeptide encoded by a polynucleotide of the twelfth aspect.

[0041] The present invention also provides compositions comprising polypeptides of the first, fourth or thirteenth aspects, polynucleotides of the second, third or twelfth aspects, or bioactive molecules of the ninth aspect, together with one or more pharmaceutically acceptable carriers, diluents or adjuvants. Compositions comprising antagonists or agonists of bioactive molecules of the invention are also contemplated.

[0042] The present invention also provides methods of treatment, comprising administering to a mammal in need thereof and effective amount of a composition of the invention.

### DEFINITIONS

[0043] The term “comprising” means “including principally, but not necessarily solely”. Furthermore, variations of the word “comprising”, such as “comprise” and “comprises”, have correspondingly varied meanings.

[0044] The term “polypeptide” means a polymer made up of amino acids linked together by peptide bonds. The term “polynucleotide” as used herein refers to a single- or double-stranded polymer of deoxyribonucleotide, ribonucleotide bases or known analogues or natural nucleotides, or mixtures thereof.

[0045] The term “lactation-associated” as used herein in relation to a polypeptide or polynucleotide means that expression of the polypeptide or polynucleotide is altered during lactation as compared to basal levels of expression before or after lactation. Expression of the polypeptide or polynucleotide may be increased or decreased during lactation, either at one point during the lactation cycle or over the course of lactation. For example, an increase or decrease in expression of the polypeptide or polynucleotide during lactation may be observed by comparing the level of expression prior to lactation initiation with the level of expression at involution, by comparing the level of expression across a lactation phase change, or by comparing the level of expression between any two timepoints in lactation.

[0046] The term “isolating” as used herein as it pertains to methods of isolating bioactive molecules means recovering the molecule from the cell culture medium substantially free of cellular material, although the molecule need not be free of all components of the media. For example a secreted polypeptide may be recovered in the extracellular media, such as the supernatant, and still be “isolated”.

[0047] The term “bioactive molecule” as used herein refers a polypeptide or polynucleotide disclosed herein having a defined biological activity. Biological activities include, for example, regulatory activities including regulation of mammary gland development, lactation, milk production and/or milk composition, or any other defined biological activity, including growth-promoting activity, anti- or pro-inflammatory activity, ant- or pro-apoptotic activity or anti-microbial activity.

[0048] The term “secreted” as used herein means that the polypeptide is secreted from the cytoplasm of a cell, either as a cell membrane-associated polypeptide with an extracellular portion or is secreted entirely into the extracellular space.

### BRIEF DESCRIPTION OF THE DRAWINGS

[0049] A preferred form of the present invention will now be described by way of example with reference to the accompanying drawings:

[0050] FIG. 1. Sequences of lactation associated polynucleotides and polypeptides identified herein (SEQ ID NOs: 1 to 502).

[0051] FIG. 2. Microarray expression profiles. Each graph shows normalized expression intensities for ESTs across lactation. Three lines of varying darkness are depicted on each graph. The light grey lines represent single channel normalization of the average intensity from Cy3 fluorescence. The dark grey lines represent single channel normalization of the average intensity from Cy5 fluorescence. The black lines represent the average of these Cy3 and Cy5 channel intensities. The scale for each EST intensity is relative, the highest individual spot intensity being 100 percent. All lines pass through the origin of the graph. Lactation phases are indicated as P (pregnancy), 2A, 2B and 3.

[0052] FIG. 3. Activation of ERK by secreted polypeptides. Each graph shows the relative fluorescence units (RFU) detected for each sample (coded by plate well number).

[0053] FIG. 4 Graph showing the normalized spot intensities for SGT20R3_C12, SGT20R1_B04 and SGT20K1_B08 from 21 days before parturition (day five pregnant) to day 260 of lactation.

### BEST MODE OF PERFORMING THE INVENTION

[0054] A variety of approaches have been adopted in an attempt to elucidate the identity of bioactive proteins in milk. However these approaches have met with limited success and it is accepted that the extent of bioactive proteins in milk has not been fully realized. Our understanding of not only human nutrition and development, but also our ability to manipulate milk production in domestic animals, will depend largely on increasing our understanding of milk composition.

[0055] With the tammar wallaby as an experimental model organism, the inventors have used a combination of microarray expression profiling and bioinformatics to identify lactation-associated polypeptides. The present invention is based on this identification of novel polypeptides and polynucleotides encoding the same, the expression of which is altered during lactation.

[0056] A polypeptide identified according to the present invention as being lactation-associated may comprise an amino acid sequence as set forth in any one of SEQ ID NOs: 2, 4, 6, 8, 10, 12, 14, 16, 18, 20, 22, 24, 26, 28, 30, 32, 34, 36, 38, 40, 42, 44, 46, 48, 50, 52, 54, 56, 58, 60, 62, 64, 66, 68, 70, 72, 74, 76, 78, 80, 82, 84, 86, 88, 90, 92, 94, 96, 98, 100, 102, 104, 106, 108, 110, 112, 114, 116, 118, 120, 122, 124, 126, 128, 130, 132, 134, 136, 138, 140, 142, 144, 146, 148, 150, 152, 154, 156, 158, 160, 162, 164, 166, 168, 170, 172, 174, 176, 178, 180, 182, 184, 186, 188, 190, 192, 194, 196, 198, 200, 202, 204, 206, 208, 210, 212, 214, 216, 218, 220, 222, 224, 226, 228, 230, 232, 234, 236, 238, 240, 242, 244, 246, 248, 250, 252, 254, 256, 258, 260, 262, 264, 266, 268, 270, 272, 274, 276, 278, 280, 282, 284, 286, 288, 290, 292, 294, 296, 298, 300, 302, 304, 306, 308, 310, 312, 314, 316, 318, 320, 322, 324, 326, 328, 330, 332, 334, 336, 338, 340, 342, 344, 346, 348, 350, 352, 354, 356, 358, 360, 362, 364, 366, 368, 370, 372, 374, 376, 378, 380, 382, 384, 386, 388, 390, 392, 394, 396, 398, 400, 402, 404, 406, 408, 410, 412, 414, 416, 418, 420, 422, 424, 426, 428, 430, 432, 434, 436, 438, 440, 442, 444, 446, 448, 450 or 452. Where an amino acid sequence disclosed herein is the partial sequence of a lactation-associated polypeptide, the corresponding complete sequence may be readily obtained using molecular biology techniques well known to those skilled in the art. Accordingly, the scope of the present invention extends to the complete lactation-associated polypeptides comprising the partial sequences identified herein. The present invention also provides polynucleotides, identified herein as being lactation-associated. A polynucleotide of the invention may comprise a nucleotide sequence as set forth in any one of SEQ ID NOs: 1, 3, 5, 7, 9, 11, 13, 15, 17, 19, 21, 23, 25, 27, 29, 31, 33, 35, 37, 39, 41, 43, 45, 47, 49, 51, 53, 55, 57, 59, 61, 63, 65, 67, 69, 71, 73, 75, 77, 79, 81, 83, 85, 87, 89, 91, 93, 95, 97, 99, 101, 103, 105, 107, 109, 111, 113, 115, 117, 119, 121, 123, 125, 127, 129, 131, 133, 135, 137, 139, 141, 143, 145, 147, 149, 151, 153, 155, 157, 159, 161, 163, 165, 167, 169, 171, 173, 175, 177, 179, 181, 183, 185, 187, 189, 191, 193, 195, 197, 199, 201, 203, 205, 207, 209, 211, 213, 215, 217, 219, 221, 223, 225, 227, 229, 231, 233, 235, 237, 239, 241, 243, 245, 247, 249, 251, 253, 255, 257, 259, 261, 263, 265, 267, 269, 271, 273, 275, 277, 279, 281, 283, 285, 287, 289, 291, 293, 295, 297, 299, 301, 303, 305, 307, 309, 311, 313, 315, 317, 319, 321, 323, 325, 327, 329, 331, 333, 335, 337, 339, 341, 343, 345, 347, 349, 351, 353, 355, 357, 359, 361, 363, 365, 367, 369, 371, 373, 375, 377, 379, 381, 383, 385, 387, 389, 391, 393, 395, 397, 399, 401, 403, 405, 407, 409, 411, 413, 415, 417, 419, 421, 423, 425, 427, 429, 431, 433, 435, 437, 439, 441, 443, 445, 447, 449, 451 or 453 to, 502. Where a nucleotide sequence disclosed herein is the partial sequence of a lactation-associated polynucleotide, the corresponding complete sequence may be readily obtained using molecular biology techniques well known to those skilled in the art. Accordingly, the scope of the present invention extends to the complete lactation-associated polynucleotides comprising the partial sequences identified herein.

[0057] The invention also provides methods for the identification and isolation of bioactivities of the polypeptides disclosed herein.

[0058] Also contemplated are methods and compositions for treating mammals in need of treatment with effective amounts of polypeptides or polynucleotides of the invention. Such treatment may be for the therapy or prevention of a medical condition in which case an “effective amount” refers to a non-toxic but sufficient amount to provide the desired therapeutic effect. The exact amount required will vary from subject to subject depending on factors such as the species being treated, the age and general condition of the subject, the severity of the condition being treated, the particular agent being administered and the mode of administration and so forth. Thus, it is not possible to specify an exact “effective amount”. However, for any given case, an appropriate “effective amount” may be determined by one of ordinary skill in the art using only routine experimentation.

[0059] Polypeptides

[0060] Lactation-associated polypeptides of the invention may be regulatory proteins, involved in, for example, regulation of lactogenesis, regulation of lactation phase changes including those relating to changes in milk composition, or regulation of the timing of initiation of milk secretion or involution. Polypeptides of the invention may be bioactive molecules with biological activities of significance to the offspring, including providing nutrition, developmental cues or protection. For example, the bioactive molecules may have anti-microbial activity, anti-inflammatory activity, pro-inflammatory activity or immune response mediator activity. Accordingly, the invention provides methods of identifying such activities in polypeptides of the invention and compositions comprising polypeptides of the invention.

[0061] Polypeptides of the invention may have signal or leader sequences to direct their transport across a membrane of a cell, for example to secrete the polypeptide into the extracellular space. The leader sequence may be naturally present on the polypeptide amino acid sequence or may be added to the polypeptide amino acid sequence by recombinant techniques known to those skilled in the art.

[0062] In addition to the lactation-associated polypeptides comprising amino acid sequences set forth herein, also included within the scope of the present invention are variants and fragments thereof.

[0063] The term “variant” as used herein refers to substantially similar sequences. Generally, polypeptide sequence variants possess qualitative biological activity in common. Further, these polypeptide sequence variants may share at least 50%, 55%, 60%, 65%, 70%, 75%, 80%, 85%, 90%, 95%, 96%, 97%, 98% or 99% sequence identity. Also included within the meaning of the term “variant” are homologues of polypeptides of the invention. A homologue is typically a polypeptide from a different mammalian species but sharing substantially the same biological function or activity as the corresponding polypeptide disclosed herein. For example, homologues of polypeptides disclosed herein may be from bovine species or humans. Such homologues can be located and isolated using standard techniques in molecular biology well known to those skilled in the art, without undue trial or experimentation. Typically homologues are identified and isolated by virtue of the sequence of the polynucleotide encoding the polypeptide, as discussed below.

[0064] Further, the term “variant” also includes analogues of the polypeptides of the invention, wherein the term “analogue” means a polypeptide which is a derivative of a polypeptide of the invention, which derivative comprises addition, deletion, substitution of one or more amino acids, such that the polypeptide retains substantially the same function. The term “conservative amino acid substitution” refers to a substitution or replacement of one amino acid for another amino acid with similar properties within a polypeptide chain (primary sequence of a protein). For example, the substitution of the charged amino acid glutamic acid (Glu) for the similarly charged amino acid aspartic acid (Asp) would be a conservative amino acid substitution.

[0065] The present invention also contemplates fragments of the polypeptides disclosed herein. The term “fragment” refers to a polypeptide molecule that encodes a constituent or is a constituent of a polypeptide of the invention or variant thereof. Typically the fragment possesses qualitative biological activity in common with the polypeptide of which it is a constituent. The peptide fragment may be between about 5 to about 150 amino acids in length, between about 5 to about 100 amino acids in length, between about 5 to about 50 amino acids in length, or between about 5 to about 25 amino acids in length. Alternatively, the peptide fragment may be between about 5 to about 15 amino acids in length.

[0066] Polynucleotides

[0067] Embodiments of the present invention provide isolated polynucleotides the expression of which is altered during lactation.

[0068] In addition to the lactation-associated polynucleotides comprising nucleotide sequences set forth herein, also included within the scope of the present invention are variants and fragments thereof.

[0069] As for polypeptides discussed above, the term “variant” as used herein refers to substantially similar sequences. Generally, polynucleotide sequence variants encode polypeptides which possess qualitative biological activity in common. Further, these polynucleotide sequence variants may share at least 50%, 55%, 60%, 65%, 70%, 75%, 80%, 85%, 90%, 95%, 96%, 97%, 98% or 99% sequence identity. Also included within the meaning of the term variant are homologues of polynucleotides of the invention. A homologue is typically a polynucleotide from a different mammalian species but sharing substantially the same biological function or activity as the corresponding polynucleotide disclosed herein. For example, homologues of polynucleotides disclosed herein may be from bovine species or humans. Such homologues can be located and isolated using standard techniques in molecular biology well known to those skilled in the art, without undue trial or experimentation. Typically homologues are identified and isolated by virtue of the sequence of a polynucleotide disclosed herein.

[0070] Fragments of polynucleotides of the invention are also contemplated. The term “fragment” refers to a nucleic acid molecule that encodes a constituent or is a constituent of a polynucleotide of the invention. Fragments of a polynucleotide, do not necessarily need to encode polypeptides which retain biological activity. Rather the fragment may, for example, be useful as a hybridization probe or PCR primer. The fragment may be derived from a polynucleotide of the invention or alternatively may be synthesized by some other means, for example chemical synthesis.

[0071] The present invention contemplates the use of polynucleotides disclosed herein and fragments thereof to identify and obtain corresponding partial and complete sequences from other species, such as bovine species and humans using methods of recombinant DNA well known to those of skill in the art, including, but not limited to southern hybridization, northern hybridization, polymerase chain reaction (PCR), ligase chain reaction (LCR) and gene mapping techniques. Polynucleotides of the invention and fragments thereof may also be used in the production of antisense molecules using techniques known to those skilled in the art.

[0072] Accordingly, the present invention contemplates oligonucleotides and fragments based on the sequences of the polynucleotides disclosed herein for use as primers and probes for the identification of homologous sequences. Oligonucleotides are short stretches of nucleotide residues suitable for use in nucleic acid amplification reactions such as PCR, typically being at least about 10 nucleotides to about 50 nucleotides in length, more typically about 15 to about 30 nucleotides in length. Probes are nucleotide sequences of variable length, for example between about 10 nucleotides and several thousand nucleotides, for use in detection of homologous sequences, typically by hybridization. The level of homology (sequence identity) between sequences will largely be determined by the stringency of hybridization conditions. In particular the nucleotide sequence used as a probe may hybridize to a homologue or other variant of a polynucleotide disclosed herein under conditions of low stringency, medium stringency or high stringency. Low stringency hybridization conditions may correspond to hybridization performed at 50° C. in 2×SSC. There are numerous conditions and factors, well known to those skilled in the art, which may be employed to alter the stringency of hybridization. For instance, the length and nature (DNA, RNA, base composition) of the nucleic add to be hybridized to a specified nucleic acid; concentration of salts and other components, such as the presence or absence of formamide, dextran sulfate, polyethylene glycol etc; and altering the temperature of the hybridization and/or washing steps. For example, a hybridization filter may be washed twice for 30 minutes in 2×SSC, 0.5% SDS and at least 55° C. (low stringency), at least 60° C. (medium stringency), at least 65° C. (medium/high stringency), at least 70° C. (high stringency) or at least 75° C. (very high stringency).

[0073] In particular embodiments, the polynucleotides of the invention may be cloned into a vector. The vector may be a plasmid vector, a viral vector, or any other suitable vehicle adapted for the insertion of foreign sequences, their introduction into eukaryotic cells and the expression of the introduced sequences. Typically the vector is a eukaryotic expression vector and may include expression control and processing sequences such as a promoter, an enhancer, ribosome binding sites, polyadenylation signals and transcription termination sequences.

[0074] Modulators

[0075] The polypeptides and polynucleotides of the present invention, and fragments and analogues thereof are useful for the screening and identification of compounds and agents that interact with these molecules. In particular, desirable compounds are those that modulate the activity of these polypeptides and polynucleotides. Such compounds may exert a modulatory effect by activating, stimulating, increasing, inhibiting or preventing expression or activity of the polypeptides and/or polynucleotides. Suitable compounds may exert their effect by virtue of either a direct (for example binding) or indirect interaction.

[0076] Compounds which bind, or otherwise interact with the polypeptides and polynucleotides of the invention, and specifically compounds which modulate their activity, may be identified by a variety of suitable methods. Interaction and/or binding may be determined using standard competitive binding assays or two-hybrid assay systems.

[0077] For example, the two-hybrid assay is a yeast-based genetic assay system typically used for detecting protein-protein interactions. Briefly, this assay takes advantage of the multi-domain nature of transcriptional activators. For example, the DNA-binding domain of a known transcriptional activator may be fused to a polypeptide, or fragment or analogue thereof, and the activation domain of the transcriptional activator fused to a candidate protein. Interaction between the candidate protein and the polypeptide, or fragment or analogue thereof, will bring the DNA-binding and activation domains of the transcriptional activator into close proximity. Interaction can thus be detected by virtue of transcription of a specific reporter gene activated by the transcriptional activator.

[0078] Alternatively, affinity chromatography may be used to identify polypeptide binding partners. For example, a polypeptide, or fragment or analogue thereof, may be immobilised on a support (such as sepharose) and cell lysates passed over the column. Proteins binding to the immobilised polypeptide, fragment or analogue can then be eluted from the column and identified. Initially such proteins may be identified by N-terminal amino acid sequencing for example.

[0079] Alternatively, in a modification of the above technique, a fusion protein may be generated by fusing a polypeptide, fragment or analogue to a detectable tag, such as alkaline phosphatase, and using a modified form of immunoprecipitation as described by Flanagan and Leder (1990).

[0080] Methods for detecting compounds that modulate activity of a polypeptide of the invention may involve combining the polypeptide with a candidate compound and a suitable labelled substrate and monitoring the effect of the compound on the polypeptide by changes in the substrate (may be determined as a function of time). Suitable labelled substrates include those labelled for colourimetric, radiometric, fluorimetric or fluorescent resonance energy transfer (FRET) based methods, for example. Alternatively, compounds that modulate the activity of the polypeptide may be identified by comparing the catalytic activity of the polypeptide in the presence of a candidate compound with the catalytic activity of the polypeptide in the absence of the candidate compound.

[0081] The present invention also contemplates compounds which may exert their modulatory effect on polypeptides of the invention by altering expression of the polypeptide. In this case, such compounds may be identified by comparing the level of expression of the polypeptide in the presence of a candidate compound with the level of expression in the absence of the candidate compound.

[0082] Polypeptides of the invention and appropriate fragments and analogues can be used in high-throughput screens to assay candidate compounds for the ability to bind to, or otherwise interact therewith. These candidate compounds can be further screened against functional polypeptides to determine the effect of the compound on polypeptide activity.

[0083] It will be appreciated that the above described methods are merely examples of the types of methods which may be employed to identify compounds that are capable of interacting with, or modulating the activity of, polypeptides of the invention, and fragments and analogues thereof, of the present invention. Other suitable methods will be known to persons skilled in the art and are within the scope of the present invention.

[0084] Potential modulators, for screening by the above methods, may be generated by a number of techniques known to those skilled in the art. For example, various forms of combinatorial chemistry may be used to generate putative non-peptide modulators. Additionally, techniques such as nuclear magnetic resonance (NMR) and X ray crystallography, may be used to model the structure of polypeptides of the invention and computer predictions used to generate possible modulators (in particular inhibitors) that will fit the shape of the substrate binding cleft of the polypeptide.

[0085] By the above methods, compounds can be identified which either activate (agonists) or inhibit (antagonists) the expression or activity of polypeptides of the invention. Such compounds may be, for example, antibodies, low molecular weight peptides, nucleic acids or non-proteinaceous organic molecules.

[0086] Antagonists or agonists of polypeptides of the invention may include antibodies. Suitable antibodies include, but are not limited to polyclonal antibodies, monoclonal antibodies, chimeric antibodies, humanised antibodies, single chain antibodies and Fab fragments.

[0087] Antibodies may be prepared from discrete regions or fragments of the polypeptide of interest. An antigenic polypeptide contains at least about 5, and preferably at least about 10, amino acids. Methods for the generation of suitable antibodies will be readily appreciated by those skilled in the art. For example, a suitable monoclonal antibody, typically containing Fab portions, may be prepared using the hybridoma technology described in Antibodies—A Laboratory Manual, (Harlow and Lane, eds.) Cold Spring Harbor Laboratory, N.Y. (1988), the disclosure of which is incorporated herein by reference.

[0088] Similarly, there are various procedures known in the art which may be used for the production of polyclonal antibodies to polypeptides of interest as disclosed herein. For the production of polyclonal antibodies, various host animals, including but not limited to rabbits, mice, rats, sheep, goats, etc, can be immunized by injection with a polypeptide, or fragment or analogue thereof. Further, the polypeptide or fragment or analogue thereof can be conjugated to an immunogenic carrier, e.g., bovine serum albumin (BSA) or keyhole limpet hemocyanin (KLH). Also, various adjuvants may be used to increase the immunological response, including but not limited to Freund's (complete and incomplete), mineral gels such as aluminium hydroxide, surface active substances such as lysolecithin, pluronic polyols, polyanions, peptides, oil emulsions, keyhole limpet hemocyanins, dinitrophenol, and potentially useful human adjuvants such as BCG (bacille Calmette-Guerin) and Corynebacterium parvum.

[0089] Screening for the desired antibody can also be accomplished by a variety of techniques known in the art. Assays for immunospecific binding of antibodies may include, but are not limited to, radioimmunoassays, ELISAs (enzyme-linked immunosorbent assay), sandwich immunoassays, immunoradiometric assays, gel diffusion precipitation reactions, immunodiffusion assays, in situ immunoassays, Western blots, precipitation reactions, agglutination assays, complement fixation assays, immunofluorescence assays, protein A assays, and immunoelectrophoresis assays, and the like (see, for example, Ausubel et al., eds, 1994, Current Protocols in Molecular Biology, Vol. 1, John Wiley & Sons, Inc., New York). Antibody binding may be detected by virtue of a detectable label on the primary antibody. Alternatively, the primary antibody may be detected by virtue of its binding with a secondary antibody or reagent which is appropriately labelled. A variety of methods are known in the art for detecting binding in an immunoassay and are within the scope of the present invention.

[0090] Embodiments of the invention may utilise antisense technology to inhibit the expression of a polynucleotide by blocking translation of the encoded polypeptide. Antisense technology takes advantage of the fact that nucleic acids pair with complementary sequences. Suitable antisense molecules can be manufactured by chemical synthesis or, in the case of antisense RNA, by transcription in vitro or in vivo when linked to a promoter, by methods known to those skilled in the art.

[0091] For example, antisense oligonucleotides, typically of 18-30 nucleotides in length, may be generated which are at least substantially complementary across their length to a region of the nucleotide sequence of the polynucleotide of interest. Binding of the antisense oligonucleotide to their complementary cellular nucleotide sequences may interfere with transcription, RNA processing, transport, translation and/or mRNA stability. Suitable antisense oligonucleotides may be prepared by methods well known to those of skill in the art and may be designed to target and bind to regulatory regions of the nucleotide sequence or to coding (exon) or non-coding (intron) sequences. Typically antisense oligonucleotides will be synthesized on automated synthesizers. Suitable antisense oligonucleotides may include modifications designed to improve their delivery into cells, their stability once inside a cell, and/or their binding to the appropriate target. For example, the antisense oligonucleotide may be modified by the addition of one or more phosphorothioate linkages, or the inclusion of one or morpholine rings into the backbone (so-called ‘morpholino’ oligonucleotides).

[0092] An alternative antisense technology, known as RNA interference (RNAi), may be used, according to known methods in the art (for example WO 99/49029 and WO 01/70949, the disclosures of which are incorporated herein by reference), to inhibit the expression of a polynucleotide. RNAi refers to a means of selective post-transcriptional gene silencing by destruction of specific mRNA by small interfering RNA molecules (siRNA). The siRNA is generated by cleavage of double stranded RNA, where one strand is identical to the message to be inactivated. Double-stranded RNA molecules may be synthesised in which one strand is identical to a specific region of the p53 mRNA transcript and introduced directly. Alternatively corresponding dsDNA can be employed, which, once presented intracellularly is converted into dsRNA. Methods for the synthesis of suitable molecule for use in RNAi and for achieving post-transcriptional gene silencing are known to those of skill in the art.

[0093] A further means of inhibiting expression may be achieved by introducing catalytic antisense nucleic acid constructs, such as ribozymes, which are capable of cleaving mRNA transcripts and thereby preventing the production of wildtype protein. Ribozymes are targeted to and anneal with a particular sequence by virtue of two regions of sequence complementarity to the target flanking the ribozyme catalytic site. After binding the ribozyme cleaves the target in a site-specific manner. The design and testing of ribozymes which specifically recognise and cleave sequences of interest can be achieved by techniques well known to those in the art (for example Lieber and Strauss, 1995, Molecular and Cellular Biology, 15:540-551, the disclosure of which is incorporated herein by reference).

[0094] Compositions

[0095] Compositions according to embodiments of the invention may be prepared according to methods which are known to those of ordinary skill in the art containing the suitable agents. Such compositions may include a pharmaceutically acceptable carrier, diluent and/or adjuvant. The carriers, diluents and adjuvants must be “acceptable” in terms of being compatible with the other ingredients of the composition, and not deleterious to the recipient thereof. These compositions can be administered by standard routes. In general, the compositions may be administered by the parenteral, topical or oral route.

[0096] It will be understood that the specific dose level for any particular individual will depend upon a variety of factors including, for example, the activity of the specific agents employed, the age, body weight, general health, diet the time of administration, rate of excretion, and combination with any other treatment or therapy. Single or multiple administrations of the agents or compositions can be carried out with dose levels and pattern being selected by the treating physician.

[0097] Generally, an effective dosage may be to be in the range of about 0.0001 mg to about 1000 mg per kg body weight per 24 hours; typically, about 0.001 mg to about 750 mg per kg body weight per 24 hours; about 0.01 mg to about 500 mg per kg body weight per 24 hours; about 0.1 mg to about 500 mg per kg body weight per 24 hours; about 0.1 mg to about 250 mg per kg body weight per 24 hours; about 1.0 mg to about 250 mg per kg body weight per 24 hours. More typically, an effective dose range may be in the range about 1.0 mg to about 200 mg per kg body weight per 24 hours; about 1.0 mg to about 100 mg per kg body weight per 24 hours; about 1.0 mg to about 50 mg per kg body weight per 24 hours; about 11.0 mg to about 25 mg per kg body weight per 24 hours; about 5.0 mg to about 50 mg per kg body weight per 24 hours; about 5.0 mg to about 20 mg per kg body weight per 24 hours; about 5.0 mg to about 15 mg per kg body weight per 24 hours.

[0098] Alternatively, an effective dosage may be up to about 500 mg/m². Generally, an effective dosage may be in the range of about 25 to about 500 mg/m², preferably about 25 to about 350 mg/m², more preferably about 25 to about 300 mg/m², still more preferably about 25 to about 250 mg/m², even more preferably about 50 to about 250 mg/m², and still even more preferably about 75 to about 150 mg/m².

[0099] Examples of pharmaceutically acceptable carriers or diluents are demineralised or distilled water; saline solution; vegetable based oils such as peanut oil, safflower oil, olive oil, cottonseed oil, maize oil, sesame oils such as peanut oil, safflower oil, olive oil, cottonseed oil, maize oil, sesame oil, arachis oil or coconut oil; silicone oils, including polysiloxanes, such as methyl polysiloxane, phenyl polysiloxane and methylphenyl polysolpoxane; volatile silicones; mineral oils such as liquid paraffin, soft paraffin or squalane; cellulose derivatives such as methyl cellulose, ethyl cellulose, carboxymethylcellulose, sodium carboxymethylcellulose or hydroxypropylmethylcellulose; lower alkanols, for example ethanol or iso-propanol; lower aralkanols; lower polyalkylene glycols or lower alkylene glycols, for example polyethylene glycol, polypropylene glycol, ethylene glycol, propylene glycol, 1,3-butylene glycol or glycerin; fatty acid esters such as isopropyl palmitate, isopropyl myristate or ethyl oleate; polyvinylpyrridone; agar, carrageenan; gum tragacanth or gum acacia, and petroleum jelly. Typically, the carrier or carriers will form from 10% to 99.9% by weight of the compositions.

[0100] The compositions of the invention may be in a form suitable for parenteral administration, or in the form of a formulation suitable for oral ingestion (such as capsules, tablets, caplets, elixirs, for example).

[0101] For administration as an injectable solution or suspension, non-toxic parenterally acceptable diluents or carriers can include, Ringer's solution, isotonic saline, phosphate buffered saline, ethanol and 1,2 propylene glycol.

[0102] Some examples of suitable carriers, diluents, excipients and adjuvants for oral use include peanut oil, liquid paraffin, sodium carboxymethylcellulose, methylcellulose, sodium alginate, gum acacia, gum tragacanth, dextrose, sucrose, sorbitol, mannitol, gelatine and lecithin. In addition these oral formulations may contain suitable flavouring and colourings agents. When used in capsule form the capsules may be coated with compounds such as glyceryl monostearate or glyceryl distearate which delay disintegration.

[0103] Adjuvants typically include emollients, emulsifiers, thickening agents, preservatives, bactericides and buffering agents.

[0104] Solid forms for oral administration may contain binders acceptable in human and veterinary pharmaceutical practice, sweeteners, disintegrating agents, diluents, flavourings, coating agents, preservatives, lubricants and/or time delay agents. Suitable binders include gum acacia, gelatine, corn starch, gum tragacanth, sodium alginate, carboxymethylcellulose or polyethylene glycol. Suitable sweeteners include sucrose, lactose, glucose, aspartame or saccharine. Suitable disintegrating agents include corn starch, methylcellulose, polyvinylpyrrolidone, guar gum, xanthan gum, bentonite, alginic acid or agar. Suitable diluents include lactose, sorbitol, mannitol, dextrose, kaolin, cellulose, calcium carbonate, calcium silicate or dicalcium phosphate. Suitable flavouring agents include peppermint oil, oil of wintergreen, cherry, orange or raspberry flavouring. Suitable coating agents include polymers or copolymers of acrylic acid and/or methacrylic acid and/or their esters, waxes, fatty alcohols, zein, shellac or gluten. Suitable preservatives include sodium benzoate, vitamin E, alpha-tocopherol, ascorbic acid, methyl paraben, propyl paraben or sodium bisulphite. Suitable lubricants include magnesium stearate, stearic acid, sodium oleate, sodium chloride or talc. Suitable time delay agents include glyceryl monostearate or glyceryl distearate.

[0105] Liquid forms for oral administration may contain, in addition to the above agents, a liquid carrier. Suitable liquid carriers include water, oils such as olive oil, peanut oil, sesame oil, sunflower oil, safflower oil, arachis oil, coconut oil, liquid paraffin, ethylene glycol, propylene glycol, polyethylene glycol, ethanol, propanol, isopropanol, glycerol, fatty alcohols, triglycerides or mixtures thereof.

[0106] Suspensions for oral administration may further comprise dispersing agents and/or suspending agents. Suitable suspending agents include sodium carboxymethylcellulose, methylcellulose, hydroxypropylmethyl-cellulose, poly-vinyl-pyrrolidone, sodium alginate or acetyl alcohol. Suitable dispersing agents include lecithin, polyoxyethylene esters of fatty acids such as stearic acid, polyoxyethylene sorbitol mono- or di-oleate, -stearate or -laurate, polyoxyethylene sorbitan mono- or di-oleate, -stearate or -laurate and the like.

[0107] The emulsions for oral administration may further comprise one or more emulsifying agents. Suitable emulsifying agents include dispersing agents as exemplified above or natural gums such as guar gum, gum acacia or gum tragacanth.

[0108] Methods for preparing parenterally administrable compositions are apparent to those skilled in the art, and are described in more detail in, for example, Remington's Pharmaceutical Science, 15th ed., Mack Publishing Company, Easton, Pa., hereby incorporated by reference herein.

[0109] The composition may incorporate any suitable surfactant such as an anionic, cationic or non-ionic surfactant such as sorbitan esters or polyoxyethylene derivatives thereof. Suspending agents such as natural gums, cellulose derivatives or inorganic materials such as silicaceous silicas, and other ingredients such as lanolin, may also be included.

[0110] Formulations suitable for topical administration comprise active ingredients together with one or more acceptable carriers, and optionally any other therapeutic ingredients. Formulations suitable for topical administration include liquid or semi-liquid preparations suitable for penetration through the skin to the site of where treatment is required, such as lotions, creams, ointments, pastes or gels.

[0111] Creams, ointments or pastes according to the present invention are semi-solid formulations of the active ingredient for external application or for intra-vaginal application. They may be made by mixing the active ingredient in finely-divided or powdered form, alone or in solution or suspension in an aqueous or non-aqueous fluid, with a greasy or non-greasy basis. The basis may comprise hydrocarbons such as hard, soft or liquid paraffin, glycerol, beeswax, a metallic soap; a mucilage; an oil of natural origin such as almond, corn, arachis, castor or olive oil; wool fat or its derivatives, or a fatty acid such as stearic or oleic acid together with an alcohol such as propylene glycol or macrogols. The composition may incorporate any suitable surfactant such as an anionic, cationic or non-ionic surfactant such as sorbitan esters or polyoxyethylene derivatives thereof. Suspending agents such as natural gums, cellulose derivatives or inorganic materials such as silicaceous silicas, and other ingredients such as lanolin, may also be included.

[0112] The compositions may also be administered in the form of liposomes. Liposomes are generally derived from phospholipids or other lipid substances, and are formed by mono- or multi-lamellar hydrated liquid crystals that are dispersed in an aqueous medium. Any non-toxic, physiologically acceptable and metabolisable lipid capable of forming liposomes can be used. The compositions in liposome form may contain stabilisers, preservatives, excipients and the like. The preferred lipids are the phospholipids and the phosphatidyl cholines (lecithins), both natural and synthetic. Methods to form liposomes are known in the art, and in relation to this specific reference is made to: Prescott, Ed., Methods in Cell Biology, Volume XIV, Academic Press, New York, N.Y. (1976), p. 33 et seq., the contents of which are incorporated herein by reference.

[0113] The present invention will now be further described in greater detail by reference to the following specific examples, which should not be construed as in anyway limiting the scope of the invention.

### EXAMPLES

### Example 1

### Tammar Wallaby cDNA Libraries

[0114] Library Construction

[0115] cDNA libraries were prepared from tammar wallaby mammary gland tissue as described below in Table 1. These libraries were derived from tissue isolated at different stages during pregnancy or the lactation cycles of wallabies. In some instances (see Table 1) the cDNA was treated, for example for size selection purposes or to remove known milk proteins, prior to ligation into the vector.

[0116] Library T20 represents a normalized library prepared (by LifeTechnologies) from equal parts of RNA isolated from pregnant tammar mammary gland at day 23 of gestation, lactating tammar mammary gland at days 55, 87, 130, 180, 220, 260 and from mammary gland after 5 days of involution (preceded by 45 days of lactation). The library was constructed from the pooled RNA using SuperScript II Rnase H-RT, directionally ligated into pCMV Sport 6.0 vector and transformed into ElectroMax DH10B cells.

TABLE 1
Tammar cDNA libraries generated in the present study

| | | | | Ligation |
|---|---|---|---|---|
| | Mammary Gland Tissue | | | insert:vector |
| Library | source | RNA purity | Treatment | ratio |
| T01 | Day 130 lactation | total RNA | none ¹ | 1:1 |
| T02 | Day 130 lactation | total RNA | none ¹ | 3:1 |
| T03 | Day 130 lactation | polyA + RNA | none ¹ | 1:1 |
| T04 | Day 130 lactation | polyA + RNA | none ¹ | 3:1 |
| T05 | Day 130 lactation | polyA + RNA | cDNA size selected | 1:1 |
| | | | 0.5-1.0 kbp ¹ | |
| T06 | Day 130 lactation | polyA + RNA | cDNA size selected | 3:1 |
| | | | 0.5-1.0 kbp ¹ | |
| T07 | Day 130 lactation | polyA + RNA | cDNA size selected | 1:1 |
| | | | 1.0-2.0 kbp ¹ | |
| T08 | Day 130 lactation | polyA + RNA | cDNA size selected | 3:1 |
| | | | 1.0-2.0 kbp ¹ | |
| T09 | Day 130 lactation | polyA + RNA | cDNA size selected | 1:1 |
| | | | 2.0-4.0 kbp ¹ | |
| T10 | Day 130 lactation | polyA + RNA | cDNA size selected | 3:1 |
| | | | 2.0-4.0 kbp ¹ | |
| T11 | Day 130 lactation | polyA + RNA | Subtracted for α-casein, β-casein, | 1:1 |
| | | | κ-casein, α-lactalbumin, β- | |
| | | | lactoglobulin ² | |
| T12 | Day 130 lactation | polyA + RNA | Subtracted for α-casein, β-casein, | 3:1 |
| | | | κ-casein, α-lactalbumin, β- | |
| | | | lactoglobulin ² | |
| T13 | Day 23 pregnancy | polyA + RNA | none ¹ | 1:1 and 3:1 |
| | | | | combined |
| T14 | Day 260 lactation | polyA + RNA | none ¹ | 1:1 and 3:1 |
| | | | | combined |
| T15 | Day 23 pregnancy | polyA + RNA | cDNA synthesized using | 1:1 and 3:1 |
| | | | Thermoscript RT ¹ | combined |
| T16 | Day 23 pregnancy | polyA + RNA | cDNA fragments purified though | 1:1 |
| | | | column as per manufacturers | |
| | | | instructions ³ | |
| T17 | Day 23 pregnancy | polyA + RNA | cDNA fragments purified though | 3:1 |
| | | | column as per manufacturers | |
| | | | instructions ³ | |
| T18 | Day 4 lactation, non- | polyA + RNA | cDNA fragments purified though | 1:1 |
| | sucked gland | | column as per manufacturers | |
| | | | instructions ³ | |
| T19 | Day 4 lactation, non- | polyA + RNA | cDNA fragments purified though | 3:1 |
| | sucked gland | | column as per manufacturers | |
| | | | instructions ³ | |

| | |
|---|---|
| T20 | normalized library (printed on microarray) |

¹ Prepared using Clontech Smart cDNA Synthesis kit, cDNA cloned in pGEM-T
² Prepared using Clontech DNA-Select Subtraction kit, cDNA cloned in pGEM-T
³ Prepared using Clontech Smart cDNA Library Construction kit

[0117] DNA Sequencing

[0118] The cDNA libraries were transformed into either DN 10B or JM109 E. coli cells and plated on LB agar containing ampicillin. Individual colonies were picked and grown in LB media containing ampicillin for plasmid preparation and sequencing. The cDNA insert was sequenced using primers specific to either the T7 or SP6 RNA polymerase promoters in the vector. Alternatively, and where appropriate, the smart oligonucleotide (used in the preparation of the cDNA) was used to sequence specifically from the 5′ end of the cDNA. Sequencing was performed on an Applied Biosystems ABI 3700 automated sequencer, used Big-Dye Terminator reactions. The DNA base calling algorithm PHRED and sequence assembly algorithm PHRAP were used to generate the final sequence files.

### Example 2

### Microarray Expression Profiling

[0119] Spotted cDNA microarrays were prepared using clones from the normalized library T20. The cDNA inserts were amplified using T7 and SP6 primers and Perkin-Elmer Taq polymerase. The resulting 9984 amplified DNA samples and Amersham's Lucidia scorecard DNA were spotted onto glass slides by the Peter MacCallum Microarray Facility (under contract). Total RNA from pregnant and lactating tammar wallaby mammary gland was extracted from tissues using Tripure Isolation Reagent (Roche), and further purified using Qiagen RNeasy columns. RNA was labeled using amino allyl reverse transcription followed by Cy3 and Cy5 coupling. Samples of 50 ug total RNA and Amersham's Lucidia Scorcard Mix were reverse transcribed in 87 ng/ul oligo dT Promega MMLV reverse transcriptase, RNAseH and 1× buffer at 42° C. for 2.5 hours. The resultant products were hydrolyzed by incubation at 65° C. for 15 minutes in the presence of 33 mM NaOH, 33 mM EDTA and 40 mM acetic acid. The cDNA was then adsorbed to a Qiagen QIAquick PCR Purification column.

[0120] Coupling of either Cy3 or Cy5 dye was performed by incubation with adsorbed cDNA in 0.1M sodium bicarbonate for 1 hour at room temperature in darkness, followed by elution in 80 ul water. Labeled cDNA was further purified using a second Qiagen QIAquick PCR Purification column. Cy3 and Cy5 labeled probes in a final concentration of 400 ug/ml yeast tRNA, 1 mg/ml human Cot-1 DNA, 200 ug/ml polydT₅₀, 1.2×Denhart's, 1 mg/ml herring sperm DNA, 3.2×SSC, 50% formamide and 0.1% SDS were heated to 100° C. for 3 minutes and then hybridized with microarray spotted cDNAs at 42° C. for 16 hours.

[0121] Microarrays were washed in 0.5×SSC, 0.01% SDS for 1 minute, 0.5×SSC for 3 minutes then 0.006×SSC for 3 minutes at room temperature in the dark.

[0122] Slides were scanned and the resulting images processed using Biorad Versarray software.

[0123] Data from spot intensities was either cross channel Loess normalized or single channel normalized. Cross channel normalization was performed using the Versarray software using the following parameters:

Background method “Local ring, Offset: 1, Width: 2, Filter: 0 Erosion: 0”
Net intensity measurement method Raw intensity—Median background (Ignore negatives)
Net intensity normalization “Cross-channel,Local regression (Loess),Median”
Cell shape Ellipse
Cell size 30×30 pixels
Single channel normalization used the Bioconductor software (Smyth and Speed, 2003, Normalization of cDNA microarray data, Methods 2003 31:265-73, see LIMMA http://bioinf.wehi.edu.au/limma) on data generated from the Versarray image analysis.

[0124] Microarray analysis of gene expression was performed using the following cross phase comparisons.

### Mammary Tissue Samples

### Phase 1 Tissue

### day 5 Pregnancy

### day 22 Pregnancy

### day 25 Pregnancy

### Phase 2A Tissue

### day 1 Lactation

### day 5 Lactation

### day 80 Lactation

### Phase 2B Tissue

### day 130 Lactation

### day 168 Lactation

### day 180 Lactation

### Phase 3 Tissue

### day 213 Lactation

### day 220 Lactation

### day 260 Lactation

### Phase 1-2A Comparisons

| Cy3 | | Cy5 |
|---|---|---|
| 5P | versus | 80L |
| 5P | versus | 1L |
| 22P | versus | 5L |
| 22P | versus | 80L |
| 25P | versus | 1L |
| 25P | versus | 5L |
| 5L | versus | 22P |
| 80L | versus | 22P |
| 1L | versus | 25P |
| 5L | versus | 25P |

### Phase 2A-2B Comparisons

| Cy3 | | Cy5 |
|---|---|---|
| 80L | versus | 168L |
| 130L | versus | 1L |
| 168L | versus | 80L |

### Phase 2B-3 Comparisons

| Cy3 | | Cy5 |
|---|---|---|
| 130L | versus | 260L |
| 130L | versus | 213L |
| 168L | versus | 220L |
| 168L | versus | 260L |
| 180L | versus | 213L |
| 168L | versus | 213L |
| 260L | versus | 130L |
| 213L | versus | 130L |
| 220L | versus | 168L |
| 260L | versus | 168L |
| 213L | versus | 168L |

[0128] The results of the lactation-associated microarray expression profiling are provided in FIG. 2.

### Example 3

### Leader Sequence Predictions

[0129] Expressed sequence tags (ESTs) potentially encoding secreted peptides were identified using a leader sequence prediction algorithm (Bannal et al., 2002, Extensive feature detection of N-terminal protein sorting signals, Bioinformatics, 18:298-305) on peptides deduced from translating sequences from Example 1 in three frames.

[0130] EST sequences were annotated by comparisons with databases of all non-redundant GenBank coding sequence translations (+PDB+SwissProt+PIR+PRF), human Unigene and GenBank.

### Example 4

### ESTs

[0131] Combining the microarray expression profiling data (Example 2) with the leader sequence predictions (Example 3), 5 groups of lactation-associated sequences have been identified. The representatives of each group including their matches to database sequences are provided in Tables 2 to 6.

[0132] Group 1

[0133] Comprised of 103 ESTs (Table 2) showing a 10-fold increase in expression across any phase change in any microarray comparison during lactation. The most 5′ element of a contig was selected. Known milk protein genes and genes obviously encoding intracellular proteins were excluded.

[0134] Group 2

[0135] Comprised of 152 ESTs (Table 3) showing a 5-fold increase in expression across any phase change in any microarray comparison during lactation. The spot intensity for the later lactation sample must be higher than the median spot intensity for that array. The EST sequence must predict a minimum open reading frame of 30 amino acids in the forward direction and contain a putative leader sequence. The most 5′ element of a contig was selected. Known milk protein genes and genes obviously encoding intracellular proteins were excluded.

[0136] Group 3

[0137] Comprised of 12 ESTs (Table 4) showing a 5-fold increase in expression across two or more phase changes during lactation. Single channel normalized spot intensities were averaged across all samples within a phase. Spot intensities increasing 5-fold from phase 1-2b, 1-3 or 2a-3, representing ESTs with a minimum open reading frame of 30 amino acids in the forward direction and contain a predicted leader sequence were included. The most 5′ element of a contig was selected. Known milk protein genes and genes obviously encoding intracellular proteins were excluded.

[0138] Group 4

[0139] Comprised of 32 ESTs (Table 5) showing a 10-fold decrease in expression across any phase change in any microarray comparison during lactation. The spot intensity for the former lactation sample must be higher than the median spot intensity for that array. The EST sequence must predict a minimum open reading frame of 30 amino acids in the forward direction and contain a putative leader sequence. The most 5′ element of a contig was selected. Only ESTs with homology with unknown or hypothetical proteins were included.

[0140] Group 5

[0141] Comprised of 29 ESTs (Table 6). The EST sequence must predict a minimum open reading frame of 100 amino acids in the forward direction and contain a putative leader sequence predicted by both the algorithm in Example 3 and by Nielsen, H. et al. Protein Engineering 10; 1-6 (1997). The most 5′ element of a contig was selected. Only ESTs with homology with unknown or hypothetical proteins were included.

TABLE 2
Group 1 ESTs

| | | Non-redundant protein sequence | |
|---|---|---|---|
| EST clone ID | Unigene match | database match | GenBank match |
| SGT20A1_B10 | unnamed protein product [Homo sapiens], mRNA sequence | unnamed protein product [Homo sapiens] | Homo sapiens cDNA FLJ90460 fis, clone |
| | /cds = (12, 1880)/gb = AK075541 /gi = 22761753 /ug = Hs.367653 | | NT2RP3001858 |
| | /len = 3593 | | |
| SGT20A1_C03 | KIAA0252 protein [Homo sapiens], mRNA sequence | | Macaca fascicularis brain cDNA clone: QtrA-10429, |
| | /cds = (349, 2106)/gb = NM_015138 /gi = 24308004 | | full insert sequence |
| | /ug = Hs.83419 /len = 4412 | | |
| SGT20A1_D07 | hypothetical protein FLJ22875 [Homo sapiens], mRNA | hypothetical protein FLJ22875 [Homo sapiens] | Homo sapiens hypothetical protein FLJ22875 |
| | sequence/cds = (151, 633) /gb = NM_032231 /gi = 15638951 | | (FLJ22875), mRNA |
| | /ug = Hs.406548/len = 1019 | | |
| SGT20A1_F05 | | | Homo sapiens chromosome 8, clone RP11-699F21, |
| | | | complete sequence |
| SGT20B1_E04 | | | |
| SGT20C1_B03 | vasoactive intestinal peptide receptor 1; pituitary adenylate | Vasoactive intestinal polypeptide receptor precursor (VIP-R) | Meleagris gallopavo putative vasoactive intestinal |
| | cyclase activating polypeptide receptor, type II; VIP | (VIPreceptor) | peptide receptor mRNA, complete cds |
| | receptor, type I; vasoactive intestinal peptide receptor; | | |
| | PACAPtype II receptor [Homo sapiens], mRNA | | |
| | sequence/cds = (110, 1483) /gb = NM_004624 /gi = 15619005 | | |
| | /ug = Hs.348500/len = 2771 | | |
| SGT20C1_C01 | KIAA0870 protein [Homo sapiens], mRNA sequence | KIAA0870 protein [Homo sapiens] | Homo sapiens KIAA0870 protein (KIAA0870), mRNA |
| | /cds = (0, 3061)/gb = AB020677 /gi = 6635136 /ug = Hs.18166 | | |
| | /len = 4628 | | |
| SGT20C1_F02 | hypothetical protein BC012331 [Homo sapiens], mRNA | hypothetical protein BC012331 [Homo | Homo sapiens hypothetical protein BC012331 |
| | sequence/cds = (32, 736) /gb = NM_138446 /gi = 19923976 | sapiens] | (LOC115416), mRNA |
| | /ug = Hs.87385/len = 774 | | |
| SGT20C1_F10 | | | Human DNA sequence from clone RP3-380B8 on |
| | | | chromosome 6p24.1-25.3 Contains a gene encoding |
| | | | the protein Neuritin, which is involved in promotion of |
| | | | neurite outgrowth, a Pyruvatekinase (PKM2) |
| | | | pseudogene, a novel mRNA, 4 CpG islands, ESTs, |
| | | | STSs and GSSs, complete sequence |
| SGT20C2_D08 | | | |
| SGT20C3_F02 | unr-interacting protein [Homo sapiens], mRNA sequence | unnamed protein product [Mus musculus] | Homo sapiens unr-interacting protein (UNRIP) |
| | /cds = (296, 1348)/gb = NM_007178 /gi_20149591 /ug_Hs.3727 | | mRNA, complete cds |
| | /len = 1867 | | |
| SGT20D1B_B04 | | | |
| SGT20D1B_D02 | cadherin 1, type 1 preproprotein; calcium-dependent | Epithelial-cadherin precursor (E-cadherin) | Homo sapiens cadherin 1, type 1, E-cadherin |
| | adhesion protein epithelial; cadherin 1, E-cadherin | (Uvomorulin) (Cadherin-1)(ARC-1) | (epithelial) (CDH1), mRNA |
| | (epithelial); uvomorulin; cell-CAM 120/80; Arc-1 [Homo | | |
| | sapiens], mRNA sequence /cds = (124, 2772) /gb = NM_004360 | | |
| | /gi = 14589887/ug = Hs.194657 /len = 4828 | | |
| SGT20D1B_G02 | | | |
| SGT20D2B_H09 | | | |
| SGT20D3_D09 | | | |
| SGT20D3_E01 | hypothetical protein MGC14832 [Homo sapiens], mRNA | hypothetical protein MGC14832 [Homo | Homo sapiens hypothetical protein MGC14832 |
| | sequence/cds = (7, 354) /gb = NM_032339 /gi = 14150125 | sapiens] | (MGC14832), mRNA |
| | /ug = Hs.333526/len = 748 | | |
| SGT20D3_G10 | | | |
| SGT20D4_A04 | hypothetical protein FLJ23293 similar to ARL-6 interacting | 5730596K20Rik protein [Mus musculus] | Homo sapiens, hypothetical protein FLJ23293 similar |
| | protein-2[Homo sapiens], mRNA sequence /cds = (70, 1695) | | to ARL-6interacting protein-2, clone MGC: 13112 |
| | /gb = BC005096/gi = 13477254 /ug = Hs.381206 /len = 2510 | | IMAGE: 4053143, mRNA, complete cds |
| SGT20D5_B03 | tumor protein, translationally-controlled 1; fortilin | tumor protein, translationally-controlled 1; | Homo sapiens tumor protein, translationally-controlled |
| | [Homo sapiens], mRNA sequence /cds = (94, 612) | fortilin; histamine-releasing factor [Homo | 1 (TPT1), mRNA |
| | /gb = NM_003295/gi = 4507668 /ug = Hs.401448 /len = 830 | sapiens] | |
| SGT20D5_E08 | scotin [Homo sapiens], mRNA sequence /cds = (134, 856) | scotin [Homo sapiens] | Homo sapiens chromosome 3 clone RP13-794C1, |
| | /gb = NM_016479/gi = 21703709 /ug = Hs.24220 /len = 2166 | | complete sequence |
| SGT20D5_G01 | | | Human DNA sequence from clone RP11-554F11 on |
| | | | chromosome 10, complete sequence |
| SGT20E1B_E01 | | | |
| SGT20E1B_E07 | amiloride-sensitive cation channel 2, neuronal isoform a; | | Homo sapiens 12 BAC RP11-469H8 (Roswell Park |
| | hBNaC2; Cation channel, amiloride-sensitive, neuronal, 2 | | Cancer Institute Human BAC Library) complete |
| | [Homo sapiens], mRNA sequence /cds = (229, 1953) | | sequence |
| | /gb = NM_020039/gi = 21536350 /ug = Hs.274361 /len = 3923 | | |
| SGT20E3_D12 | | | |
| SGT20E3_G09 | | | |
| SGT20F1_B06 | | | |
| SGT20F1_D09 | | | |
| SGT20F1_E11 | nuclease sensitive element binding protein 1; | nuclease sensitive element binding protein | Bovine transcription factor EF1(A) mRNA, complete |
| | Major histocompatibility complex, class II, Y box- | 1 [Bos taurus] | cds |
| | binding protein I; DNA-binding protein B [Homo sapiens], | | |
| | mRNA sequence /cds = (234, 1202) /gb = NM_004559 | | |
| | /gi = 4758829/ug = Hs.74497 /len = 1474 | | |
| SGT20F3_C12 | | | |
| SGT20F3_H07 | spermidine synthase; Spermidine synthase-1 [Homo | spermidine synthase [Rattus norvegicus] | Homo sapiens, spermidine synthase, clone |
| | sapiens], mRNA sequence /cds = (82, 990) /gb = NM_003132 | | MGC: 45687 IMAGE: 5420683, mRNA, complete cds |
| | /gi = 4507208/ug = Hs.76244 /len = 1238 | | |
| SGT20G1_D10 | | hypothetical protein [Pseudomonas | |
| | | syringae pv. tomato str. DC3000] | |
| SGT20G1_D11 | | | |
| SGT20G1_F02 | transmembrane 4 superfamily member 6; tetraspan TM4SF; | Homo sapiens transmembrane 4 | Homo sapiens transmembrane 4 superfamily member |
| | A15 homolog; tetraspanin TM4-D; tetraspanin 6 [Homo | superfamily member 6 [synthetic construct] | 6 (TM4SF6), mRNA |
| | sapiens], mRNA sequence /cds = (103, 840) /gb = NM_003270 | | |
| | /gi = 21265115/ug = Hs.121068 /len = 2069 | | |
| SGT20G1_H04 | ATP-binding cassette, sub-family G, member 2; breast | unnamed protein product [Homo sapiens] | Sus scrofa mRNA for brain multidrug resistance |
| | cancer resistance protein; mitoxantrone resistance | | protein (BMDP gene) |
| | protein; placenta specific MDR protein [Homo sapiens], | | |
| | mRNA sequence /cds = (204, 2171) /gb = NM_004827 | | |
| | /gi = 4757849/ug = Hs.194720 /len = 2719 | | |
| SGT20G1_H07 | | | |
| SGT20G2_C01 | | | |
| SGT20G2_H02 | | | |
| SGT20G3_A01 | KIAA0985 protein [Homo sapiens], mRNA sequence | Transcobalamin I precursor (TCI) (TC I) | Mus musculus chromosome 5 clone rp23-403I21 |
| | /cds = (329, 2413)/gb = NM_014954 /gi = 7662431 /ug = Hs.21239 | | strain C57BL/6J, complete sequence |
| | /len = 4511 | | |
| SGT20G3_H02 | | | |
| SGT20G3_H06 | ATPase, Ca++ transporting, fast twitch 1 [Homo sapiens], | hypothetical protein [Homo sapiens] | Mus musculus, clone MGC: 28518 IMAGE: 4191741, |
| | mRNA sequence /cds = (0, 2984) /gb = NM_004320 | | mRNA, complete cds |
| | /gi = 10835219/ug = Hs.183075 /len = 3082 | | |
| SGT20G4_B08 | | angiopoietin-like 5; fibrinogen-like [Homo | |
| | | sapiens] | |
| SGT20G4_F01 | hypothetical protein MGC10731 [Homo sapiens], mRNA | hypothetical protein MGC10731 [Homo | Homo sapiens hypothetical protein MGC10731 |
| | sequence/cds = (218, 994) /gb = NM_030907 /gi = 13569861 | sapiens] | (MGC10731), mRNA |
| | /ug = Hs.322487/len = 1361 | | |
| SGT20G4_G03 | calcium binding protein Cab45 precursor [Homo sapiens], | stromal cell derived factor 4 [Mus musculus] | Mus musculus stromal cell derived factor 4 (Sdf4), |
| | mRNA sequence /cds = (293, 1339) /gb = NM_016547 | | mRNA |
| | /gi = 7706572/ug = Hs.42806 /len = 2092 | | |
| SGT20H1_F08 | | | |
| SGT20H1_G12 | | | |
| SGT20H2_H03 | | | |
| SGT20H3_G12 | | | |
| SGT20H3_H12 | | | |
| SGT20I6_G03 | | | |
| SGT20J4_F01 | | | |
| SGT20J5_D02 | GL004 protein [Homo sapiens], mRNA sequence | GL004 protein [Homo sapiens] | Homo sapiens GL004 protein (GL004), mRNA |
| | /cds = (929, 1804)/gb = NM_020194 /gi = 20070305 /ug = Hs.7045 | | |
| | /len = 1886 | | |
| SGT20K1_H12 | | | |
| SGT20K2_E12 | | | |
| SGT20K2_F12 | | leucine-rich repeat extensin family | |
| | | [Arabidopsis thaliana] | |
| SGT20K2_H03 | | | |
| SGT20K3_F11 | KIAA0678 protein [Homo sapiens], mRNA sequence | | Homo sapiens KIAA0678 protein (KIAA0678), mRNA |
| | /cds = (0, 3066)/gb = AB014578 /gi = 3327169 /ug = Hs.12707 | | |
| | /len = 3811 | | |
| SGT20K3_H02 | WW domain-containing binding protein 4; formin binding | WW domain-containing binding protein 4; | Homo sapiens WW domain binding protein 4 (formin |
| | protein 21[Homo sapiens], mRNA sequence | formin binding protein 21 [Homo sapiens] | binding protein 21) (WBP4), mRNA |
| | /cds = (113, 1243)/gb = NM_007187 /gi = 21536424 | | |
| | /ug = Hs.28307 /len = 2354 | | |
| SGT20K4_A03 | emopamil-binding protein (sterol isomerase); 3-beta- | emopamil binding protein (sterol | Homo sapiens emopamil binding protein (sterol |
| | hydroxysteroid-delta-8,delta-7-isomerase; Chondrodypslasia | isomerase); Chondrodysplasiapunctata-2, | isomerase) (EBP), mRNA |
| | punctata-2, X-linked dominant (Happlesyndrome) [Homo | X-linked dominant (Happle | |
| | sapiens], mRNA sequence /cds = (111, 803)/gb = NM_006579 | syndrome); emopamil-binding protein (sterol | |
| | /gi = 5729809 /ug = Hs.75105 /len = 1073 | isomerase); 3-beta-hydroxysteroid-delta- | |
| | | 8,delta-7-isomerase; sterol8-isomerase | |
| | | [Homo sapiens] | |
| SGT20L4_D07 | | | |
| SGT20L4_F01 | | | |
| SGT20M5_H02 | | | |
| SGT20N1_G03 | fatty acid binding protein 3; Fatty acid-binding protein 3, | fatty acid binding protein (heart) like [Bos | Sus scrofa partial mRNA for heart fatty acid-binding |
| | muscle; H-FABP; mammary-derived growth inhibitor [Homo | taurus] | protein (FABP3gene) |
| | sapiens], mRNA sequence /cds = (45, 446) /gb = NM_004102 | | |
| | /gi = 10938020/ug = Hs.49881 /len = 679 | | |
| SGT20N5_B07 | | | |
| SGT20N5_B09 | | | |
| SGT20N5_G11 | hypothetical protein FLJ10597 [Homo sapiens], mRNA | hypothetical protein [Macaca fascicularis] | Homo sapiens, clone IMAGE: 4814781, mRNA |
| | sequence/cds = (62, 799) /gb = NM_018150 /gi = 8922541 | | |
| | /ug = Hs.90375/len = 2494 | | |
| SGT20O1_C06 | ribonuclease/angiogenin inhibitor, Placental ribonuclease | ribonuclease/angiogenin inhibitor 1 [Mus | Homo sapiens ribonuclease/angiogenin inhibitor |
| | inhibitor[Homo sapiens], mRNA sequence | musculus] | (RNH), mRNA |
| | /cds = (1408, 2793)/gb = NM_002939 /gi = 21361546 | | |
| | /ug = Hs.75108 /len = 2982 | | |
| SGT20O1_D05 | | | |
| SGT20O1_D10 | | | |
| SGT20O2_F04 | | | |
| SGT20O3_C10 | | | |
| SGT20O3_D11 | | | |
| SGT20O3_D12 | | | |
| SGT20O3_E05 | peroxiredoxin 1; Proliferation-associated gene | peroxiredoxin 1; natural killer-enhancing | Homo sapiens, peroxiredoxin 1, clone MGC: 24196 |
| | A; proliferation-associated gene A (naturalkiller-enhancing | factor A; proliferation-associated gene A | IMAGE: 3681912, mRNA, complete cds |
| | factor A) [Homo sapiens], mRNA sequence/cds = (60, 659) | [Homo sapiens] | |
| | /gb = NM_002574 /gi = 4505590 /ug = Hs.180909/len = 937 | | |
| SGT20O3_H02 | | | |
| SGT20O3_H10 | | | |
| SGT20O4_C03 | PRO1851 [Homo sapiens], mRNA sequence | Inter-alpha-trypsin inhibitor heavy chain H4 | Homo sapiens PRO1851 mRNA, complete cds |
| | /cds = (304, 2238) /gb = AF119856/gi = 7770148 /ug = Hs.406267 | precursor (ITI heavychain H4) (Inter-alpha- | |
| | /len = 2446 | inhibitor heavy chain 4)(Inter-alpha-trypsin | |
| | | inhibitor family heavy chain-relatedprotein) | |
| | | (IHRP) (Major acute phase protein) (MAP) | |
| SGT20O5_F04 | | | |
| SGT20O5_F05 | | | |
| SGT20P1_F05 | Similar to major histocompatibility complex, class I, F | class I histocompatibility antigen Maru-UB- | Macropus rufogriseus MHC class I protein (Maru- |
| | [Homo sapiens], mRNA sequence /cds = (29, 1069) | 01 alpha chain precursor-red-necked | UB*01) mRNA, complete cds |
| | /gb = BC018925/gi = 17511934 /ug = Hs.283611 /len = 4146 | wallaby | |
| SGT20P2_H07 | hypothetical protein BC012008 [Homo sapiens], mRNA | | Homo sapiens hypothetical protein BC012008 |
| | sequence/cds = (394, 492) /gb = NM_138473 /gi = 19924004 | | (LOC144467), mRNA |
| | /ug = Hs.348374/len = 1510 | | |
| SGT20P2_H11 | | | |
| SGT20P2_H12 | | | |
| SGT20P3_F02 | osteomodulin [Homo sapiens], mRNA sequence | osteomodulin [Homo sapiens] | Homo sapiens osteomodulin (OMD), mRNA |
| | /cds = (100, 1365)/gb = NM_005014 /gi = 4826875 /ug = Hs.94070 | | |
| | /len = 2263 | | |
| SGT20P3_G09 | | | |
| SGT20P4_G03 | | 18K lipopolysaccharide-binding protein | |
| | | precursor - rabbit | |
| SGT20P4_H11 | | hypothetical protein (L1H 3′ region) - human | Homo sapiens chromosome 8, clone RP11-48J8, |
| | | | complete sequence |
| SGT20P5_A10 | | | |
| SGT20P5_B10 | | | |
| SGT20P5_C03 | | | |
| SGT20P5_D11 | | | |
| SGT20P5_E05 | | | |
| SGT20P5_G06 | | | |
| SGT20P5_G12 | | | |
| SGT20Q1_A06 | | | |
| SGT20Q1_A09 | | | |
| SGT20Q1_C09 | 601657005R1 NIH_MGC_67 Homo sapiens cDNA clone | | Homo sapiens hypothetical protein DKFZp547B0714 |
| | IMAGE: 3866184 3′, mRNA sequence | | (DKFZp547B0714), mRNA |
| | /clone = IMAGE: 3866184 /clone_end = 3′/gb = BE963678 | | |
| | /gi = 11767097 /ug = Hs.393377 /len = 670 | | |
| SGT20Q1_G09 | | | |
| SGT20Q3_E10 | | | Wallabia bicolor isolate W15 retroposon CORE-SINE |
| | | | Mar-1 sequence |
| SGT20Q5B_D02 | | | Wallabia bicolor isolate W15 retroposon CORE-SINE |
| | | | Mar-1 sequence |
| SGT20U4_D03 | | freeze tolerance-associated protein FR47 | |
| | | [Rana sylvatica] | |
| SGT20U5_C10 | | | |
| SGT20W1_F04 | | | |

TABLE 3
Group 2 ESTs

| | | Non-redundant protein sequence database | |
|---|---|---|---|
| EST clone ID | Unigene match | match | GenBank match |
| SGT20A1_C07 | acetyl-CoA synthetase isoform a; cytoplasmic acetyl-coenzyme | unnamed protein product [Mus musculus] | Homo sapiens acetyl-Coenzyme A synthetase |
| | Asynthetase; acetate-CoA ligase; acyl-activating enzyme; acetate | | 2 (ADP forming) (ACAS2), transcript variant 2, |
| | thiokinase; acetyl-CoA synthetase [Homo sapiens], mRNA | | mRNA |
| | sequence /cds = (74, 2179) /gb = NM_018677 | | |
| | /gi = 21269869/ug = Hs.14779 /len = 2925 | | |
| SGT20A1_H05 | | | |
| SGT20A1_H08 | | | |
| SGT20B1_H10 | to 78f09.x1 NCI_CGAP_Gas4 Homo sapiens cDNA clone | RIKEN cDNA 1110064A23 [Mus musculus] | Homo sapiens cDNA: FLJ21926 fis, clone |
| | IMAGE: 2184425 3′, mRNA sequence /clone = IMAGE: 2184425 | | HEP04142, highly similar to AB016092 Homo |
| | /clone_end = 3′/gb = AI570375 /gi = 4533749 /ug = Hs.228943 | | sapiens mRNA for RNA binding protein |
| | /len = 390 | | |
| SGT20C1_C07 | | | |
| SGT20C1_E04 | UI-CF-EC1-aca-c-21-0-UI.s1 UI-CF-EC1 Homo sapiens cDNA | RIKEN cDNA 2010208K18 [Mus musculus] | Homo sapiens cDNA FLJ13019 fis, clone |
| | cloneUI-CF-EC1-aca-c-21-0-UI 3′, mRNA sequence/clone = UI-CF- | | NT2RP3000736, highly similar to Human |
| | EC1-aca-c-21-0-UI /clone_end = 3′/gb = BM974250 /gi = 19591841 | | mRNA for KIAA0140 gene |
| | /ug = Hs.421587 /len = 754 | | |
| SGT20C2_E05 | hypothetical protein FLJ25124 [Homo sapiens], mRNA | unnamed protein product [Homo sapiens] | Homo sapiens cDNA FLJ25124 fis, clone |
| | sequence/cds = (73, 3078) /gb = NM_144698 /gi = 24432064 | | CBR06414 |
| | /ug = Hs.133081/len = 3323 | | |
| SGT20C2_F04 | Similar to small inducible cytokine A4 [Homo sapiens], | LAG-1 [Homo sapiens] | Mus musculus chemokine (C-C motif) ligand 4 |
| | mRNA sequence /cds = (65, 250) /gb = BC027961 | | (Ccl4), mRNA |
| | /gi = 20379894/ug = Hs.75703 /len = 1798 | | |
| SGT20C3_C12 | chromosome 14 open reading frame 1 [Homo sapiens], mRNA | HSPC288 [Homo sapiens] | Homo sapiens chromosome 14 open reading |
| | sequence/cds = (72, 494) /gb = NM_007176 /gi = 6005718 | | frame 1 (C14orf1), mRNA |
| | /ug = Hs.15106/len = 2274 | | |
| SGT20C3_E08 | JM1 protein [Homo sapiens], mRNA sequence | DXImx40e protein [Mus musculus] | Homo sapiens, Similar to JM1 protein, clone |
| | /cds = (86, 1969)/gb = NM_014008 /gi = 7661843 /ug = Hs.26333 | | MGC: 15381 IMAGE: 4299954, mRNA, |
| | /len = 2228 | | complete cds |
| SGT20C3_H10 | | | |
| SGT20C4_H03 | MCM3 minichromosome maintenance deficient 3 (S. cerevisiae) | Unknown (protein for IMAGE: 3831362) [Homo | Homo sapiens cDNA FLJ37862 fis, clone |
| | associated protein; minichromosome maintenance 3- | sapiens] | BRSSN2015707, highly similar to 80 KDA |
| | associated protein, 80-kD; minichromosome maintenance deficient | | MCM3-ASSOCIATED PROTEIN |
| | (S. cerevisiae) 3-associated protein; human mRNA for MCM3 | | |
| | import factor, MCM3 im> /cds = (37, 5979)/gb = NM_003906 | | |
| | /gi = 19923190 /ug = Hs.168481 /len = 6114 | | |
| SGT20C5_F01 | | VMP4 protein [Volvox carteri f. nagariensis] | |
| SGT20D1B_A10 | melanoma-associated antigen p97, isoform 1, | melanoma-associated antigen p97 isoform 1, | Homo sapiens antigen p97 (melanoma |
| | precursor; melanotransferrin; melanoma-associated antigen p97 | precursor; melanoma-associated antigen p97; | associated) identified bymonoclonal antibodies |
| | [Homo sapiens], mRNA sequence /cds = (69, 2285) | melanotransferrin [Homo sapiens] | 133.2 and 96.5 (MFI2), transcriptvariant 1, |
| | /gb = NM_005929/gi = 16933549 /ug = Hs.271966 /len = 2377 | | mRNA |
| SGT20D1B_F10 | | | |
| SGT20D2B_C07 | UI-H-ED0-axb-n-02-0-UI.s1 NCI_CGAP_ED0 Homo sapiens | RIKEN cDNA 1110064A23 [Mus musculus] | H. sapiens mRNA for fibrillin |
| | cDNA clone IMAGE: 5826625 3′, mRNA sequence | | |
| | /clone = IMAGE: 5826625/clone_end = 3′ /gb = BM995286 | | |
| | /gi = 19720187 /ug = Hs.433864/len = 1281 | | |
| SGT20D2B_G07 | choline phosphotransferase 1; cholinephosphotransferase | unnamed protein product [Mus musculus] | Homo sapiens choline phosphotransferase 1 |
| | 1; cholinephosphotransferase 1 alpha [Homo sapiens], | | (CHPT1), mRNA |
| | mRNAsequence /cds = (170, 1390) /gb = NM_020244 | | |
| | /gi = 9910383/ug = Hs.171889 /len = 1536 | | |
| SGT20D2B_H10 | | BETA-LACTOGLOBULIN PRECURSOR | M. eugenil mRNA for beta-lactoglobulin |
| SGT20D3_E07 | HSPC043 protein [Homo sapiens], mRNA sequence | HSPC291 [Homo sapiens] | Homo sapiens HSPC043 protein (HSPC043), |
| | /cds = (177, 491)/gb = NM_021218 /gi = 24308268 /ug = Hs.46624 | | mRNA |
| | /len = 1532 | | |
| SGT20D3_F05 | | | Macropus giganteus microsatellite G12-6 |
| | | | sequence |
| SGT20D4_H08 | | | |
| SGT20D5_A02 | | | |
| SGT20E1B_H04 | KIAA1299 protein [Homo sapiens], mRNA sequence | unnamed protein product [Homo sapiens] | Homo sapiens SH2-B homolog (SH2B), |
| | /cds = (3114, 5306)/gb = AB037720 /gi = 7242952 /ug = Hs.15744 | | mRNA |
| | /len = 6043 | | |
| SGT20E3_A04 | seipin [Homo sapiens], mRNA sequence /cds = (506, 1900) | seipin [Homo sapiens] | Homo sapiens Bemardinelli-Selp congenital |
| | /gb = NM_032667/gi = 21362089 /ug = Hs.293981 /len = 2012 | | lipodystrophy 2 (seipin)(BSCL2), mRNA |
| SGT20E3_C11 | | AA589509 protein [Mus musculus] | Rattus norvegicus Mk1 protein (Mk1), mRNA |
| SGT20E3_E03 | | hypothetical protein [Pseudomonas syringae | |
| | | pv. syringae B728a] | |
| SGT20E3_G07 | Homo sapiens cDNA FLJ33231 fis, clone ASTRO2001806, | | Homo sapiens chromosome 11, clone RP11- |
| | mRNA sequence/gb = AK090550 /gi = 21748732 /ug = Hs.198793 | | 265D17, complete sequence |
| | /len = 3750 | | |
| SGT20E4_B08 | | | |
| SGT20E4_H03 | | carbonic anhydrase 15 [Mus musculus] | Mus musculus carbonic anhydrase 15 (Car15), |
| | | | mRNA |
| SGT20F1_E06 | | | |
| SGT20F2_C07 | UDP-N-acteylglucosamine pyrophosphorylase 1; AgX; sperm | Chain A, Crystal Structure Of Human Agx2 | Homo sapiens UDP-N-acteylglucosamine |
| | associatedantigen 2; UDP-N-acteylglucosamine | Complexed With Udpglcnac | pyrophosphorylase 1 (UAP1), mRNA |
| | pyrophosphorylase 1; Sperm associated antigen 2 [Homo | | |
| | sapiens], mRNA sequence/cds = (311, 1828) /gb = NM_003115 | | |
| | /gi = 19923738 /ug = Hs.21293/len = 2332 | | |
| SGT20F2_E06 | Homo sapiens mRNA; cDNA DKFZp686I2113 (from clone | gamma-glutamyltransferase 1 [Homo sapiens] | Homo sapiens gamma-glutamyltransferase 1 |
| | DKFZp686I2113), mRNA sequence /gb = AL832738 /gi = 21733319 | | (GGT1), transcript variant 3, mRNA |
| | /ug = Hs.401847/len = 5325 | | |
| SGT20F2_H03 | oxysterol-binding protein-like protein 5 isoform a; oxysterol- | oxysterol-binding protein-like protein 5 isoform | Homo sapiens, similar to oxysterol binding |
| | binding protein-related protein 5; OSBP-related protein | a; oxysterol-binding protein-related protein 5; | protein-like 5, clone MGC: 48715 |
| | 5; oxysterol-binding protein homologue 1 [Homo sapiens], mRNA | OSBP-related protein 5; oxysterol-binding | IMAGE: 5769002, mRNA, complete cds |
| | sequence /cds = (116, 2755) /gb = NM_020896 | protein homologue 1 [Homo sapiens] | |
| | /gi = 22035607/ug = Hs.112034 /len = 3873 | | |
| SGT20F3_E11 | DKFZP564O243 protein [Homo sapiens], mRNA sequence | DKFZP564O243 protein [Homo sapiens] | Homo sapiens DKFZP564O243 protein |
| | /cds = (77, 892)/gb = NM_015407 /gi = 24475632 /ug = Hs.92700 | | (DKFZP564O243), mRNA |
| | /len = 1102 | | |
| SGT20F4_B09 | | | Wallabia bicolor isolate W51 retroposon |
| | | | CORE-SINE Mar-1 sequence |
| SGT20G1_A05 | coronin, actin binding protein, 1B [Homo sapiens], mRNA | coronin, actin binding protein 1B; coronin 1b; | Oryctolagus cuniculus coronin-like protein |
| | sequence/cds = (61, 1530) /gb = NM_020441 /gi = 14149733 | coronin 2 [Mus musculus] | pp66 mRNA, complete cds |
| | /ug = Hs.6191/len = 1877 | | |
| SGT20G1_A11 | | | |
| SGT20G1_E11 | carbonyl reductase; kidney dicarbonyl reductase [Homo | diacetyl/L-xylulose reductase [Rattus | Homo sapiens dicarbonyl/L-xylulose reductase |
| | sapiens], mRNA sequence /cds = (3, 737) /gb = NM_016286 | norvegicus] | (DCXR), mRNA |
| | /gi = 7705924/ug = Hs.9857 /len = 848 | | |
| SGT20G2_E04 | angiopoietin-like 4 protein; hepatic angiopoietin-related | fasting-induced adipose factor [Mus musculus] | Mus musculus fasting-induced adipose factor |
| | protein; PPARG angiopoietin related protein; fasting- | | mRNA, complete cds |
| | induced adipose factor; hepatic fibrinogen/angiopoietin- | | |
| | related protein [Homo sapiens], mRNA sequence | | |
| | /cds = (195, 1415)/gb = NM_139314 /gi = 21536397 /ug = Hs.9613 | | |
| | /len = 1967 | | |
| SGT20G3_C08 | xanthene dehydrogenase; xanthine oxidase; xanthine | xanthine dehydrogenase [Fells catus] | Fells catus xanthine dehydrogenase (XDH) |
| | dehydrogenase[Homo sapiens], mRNA sequence | | mRNA, complete cds |
| | /cds = (81, 4082)/gb = NM_000379 /gi = 9257259 /ug = Hs.250 | | |
| | /len = 4428 | | |
| SGT20G3_C12 | | pherophorin-dz1 protein [Volvox carteri f. nagariensis] | |
| SGT20H1_D04 | guanine nucleotide-binding protein, beta-2 subunit; G protein, | guanine nuclotide-binding protein, beta-2 | Mus musculus, guanine nucleotide binding |
| | beta-2 subunit; guanine nucleotide-binding protein G(I)/G(S)/G(T) | subunit [Mus musculus] | protein, beta 2, clone MGC: 25597 |
| | beta subunit 2; signal-transducing guanine nucleotide-binding | | IMAGE: 4019292, mRNA, complete cds |
| | regulatory protein beta subunit; transducin beta chain 2 [Homo> | | |
| | /cds = (258, 1280)/gb = NM_005273 /gi = 20357528 /ug = Hs.91299 | | |
| | /len = 1666 | | |
| SGT20H1_D09 | | | |
| SGT20H1_F05 | | OJ1117_G01.23 [Oryza sativa (japonica | |
| | | cultivar-group)] | |
| SGT20H1_H06 | | | Homo sapiens BAC clone CTD-3045A19 from |
| | | | 7, complete sequence |
| SGT20H3_D01 | SMC1 (structural maintenance of chromosomes 1, yeast)-like | | Wallabia bicolor isolate W42 retroposon |
| | 1; Segregation of mitotic chromosomes 1 (SMC1, yeast | | CORE-SINE Mar-1 sequence |
| | human homolog of [Homo sapiens], mRNA sequence | | |
| | /cds = (33, 3734)/gb = NM_006306 /gi = 5453641 /ug = Hs.211602 | | |
| | /len = 5190 | | |
| SGT20H3_E07 | | | |
| SGT20H4_F07 | nuclear receptor subfamily 1, group H, member 2; ubiquitously- | orphan receptor | Mus musculus nuclear receptor subfamily 1, |
| | expressed nuclear receptor [Homo sapiens], mRNA sequence | | group H, member 2(Nr1h2), mRNA |
| | /cds = (244, 1629) /gb = NM_007121 /gi = 11321629/ug = Hs.100221 | | |
| | /len = 2010 | | |
| SGT20H4_G04 | osteoprotegerin precursor; tumor necrosis factor | osteoprotegerin [Homo sapiens] | Homo sapiens tumor necrosis factor receptor |
| | receptor superfamily, member 11b; | | superfamily, member 11b(osteoprotegerin) |
| | osteoprotegerin; osteoclastogenesis inhibitory factor [Homo | | (TNFRSF11B), mRNA |
| | sapiens], mRNA sequence /cds = (251, 1456) /gb = NM_002546 | | |
| | /gi = 22547122/ug = Hs.81791 /len = 2291 | | |
| SGT20H5_D04 | URB [Homo sapiens], mRNA sequence /cds = (145, 2997) | similar to URB [Homo sapiens] | Homo sapiens likely ortholog of mouse Urb |
| | /gb = AF506819/gi = 21039408/ug = Hs.356289 /len = 3320 | | (URB), mRNA |
| SGT20I1_D07 | EBNA-2 co-activator (100 kD) [Homo sapiens], mRNA | Unknown (protein for MGC: 790) [Homo | Homo sapiens EBNA-2 co-activator (100 kD) |
| | sequence/cds = (267, 2924) /gb = NM_014390 /gi = 7657430 | sapiens] | (p100), mRNA |
| | /ug = Hs.79093/len = 3480 | | |
| SGT20I3_C02 | | | |
| SGT20I3_E02 | KIAA1723 protein [Homo sapiens], mRNA sequence | KIAA1723 protein [Homo sapiens] | Homo sapiens deleted in liver cancer 1 |
| | /cds = (252, 4916)/gb = AB051510 /gi = 12697990 /ug = Hs.8700 | | (DLC1), mRNA |
| | /len = 7365 | | |
| SGT20I4_B04 | transcription factor binding to IGHM enhancer 3; Transcription | TFE3 transcription factor [Homo sapiens] | Homo sapiens transcription factor binding to |
| | factor for IgH enhancer [Homo sapiens], mRNA | | IGHM enhancer 3 (TFE3), mRNA |
| | sequence/cds = (238, 1965) /gb = NM_006521 /gi = 21359903 | | |
| | /ug = Hs.274184/len = 3431 | | |
| SGT20I5_D07 | | | |
| SGT20J1_G03 | | | Didelphis virginiana isolate O40 retroposon |
| | | | CORE-SINE Mar-1sequence |
| SGT20J1_G07 | | | |
| SGT20J3_F01 | | | |
| SGT20J3_F04 | tz76e06.x1 NCI_CGAP_Pan1 Homo sapiens cDNA clone | A ‘c’ was inserted after nt 369 (=nt 10459 in | Mus musculus G protein-coupled receptor 84 |
| | IMAGE: 22945303′, mRNA sequence /clone = IMAGE: 2294530 | genomic sequence(M10126)) to correct-1 | (Gpr84), mRNA |
| | /clone_end = 3′/gb = AI913173 /gi = 5633116 /ug = Hs.413861 | frameshift probably due to gelcompression | |
| | /len = 441 | | |
| SGT20J3_G01 | | | |
| SGT20J3_H03 | | | |
| SGT20J4_F09 | | | |
| SGT20J5_B10 | AL515111 LTI_NFL006_PL2 Homo sapiens cDNA clone | hydroxyproline-rich glycoprotein DZ-HRGP | BAC sequence from the SPG4 candidate |
| | CL0BB022ZB11 3prime, mRNA sequence | [Volvox carteri f. nagariensis] | region at 2p21-2p22 BAC 367K01 of library |
| | /clone = CL0BB022ZB11 /clone_end = 3′/gb = AL515111 | | CITB_978_SKB from chromosome 2 of Homo |
| | /gi = 12778604 /ug = Hs.331862 /len = 460 | | sapiens (Human) |
| SGT20J5_C08 | | | Homo sapiens Xp BAC RP11-459A10 |
| | | | (Roswell Park Cancer Institute Human |
| | | | BAC Library) complete sequence |
| SGT20J6_B08 | Homo sapiens, Similar to hypothetical protein FLJ14642, | hypothetical protein FLJ14642 [Homo | Homo sapiens, Similar to hypothetical protein |
| | clone IMAGE: 5266209, mRNA, mRNA sequence | sapiens] | FLJ14642, clone IMAGE: 5266209, mRNA |
| | /gb = BC038673/gi = 24270879 /ug = Hs.245342 /len = 4512 | | |
| SGT20J6_F03 | Homo sapiens, Similar to myeloid/lymphoid or mixed-lineage | nucleolar and coiled-body phosphoprotein 1 | Cepaea nemoralis microsatellite Cne1 |
| | leukemia (trithorax (Drosophila) homolog); translocated to, 3, clone | [Mus musculus] | sequence |
| | IMAGE: 5212069, mRNA, mRNA sequence | | |
| | /gb = BC030550/gi = 22539718 /ug = Hs.382134 /len = 2059 | | |
| SGT20J6_H10 | signal peptidase complex (18 kD) [Homo sapiens], mRNA | signal peptidase complex; sid2895p; signal | Homo sapiens signal peptidase complex |
| | sequence/cds = (77, 616) /gb = NM_014300 /gi = 7657608 | peptidase complex (18 kD) [Mus musculus] | (18 kD) (SPC18), mRNA |
| | /ug = Hs.9534/len = 1105 | | |
| SGT20K1_B08 | hypothetical protein MGC4618 [Homo sapiens], mRNA | unnamed protein product [Mus musculus] | Mus musculus, RIKEN cDNA 3010001K23 |
| | sequence/cds = (107, 1621) /gb = NM_032326 /gi = 14150103 | | gene, clone MGC: 8187 IMAGE: 3590497, |
| | /ug = Hs.89072/len = 1818 | | mRNA, complete cds |
| SGT20K1_B12 | | | |
| SGT20K1_H09 | hypothetical protein MGC11275; likely ortholog of mouse | similar to RIKEN cDNA 2610042J20; | Homo sapiens chromosome 16 clone RP11- |
| | syndesmos[Homo sapiens], mRNA sequence | expressed sequence N28182 [Mus musculus] | 709D24, complete sequence |
| | /cds = (21, 656)/gb = NM_032349 /gi = 14150146 /ug = Hs.6949 | [Rattus norvegicus] | |
| | /len = 1350 | | |
| SGT20K2_H10 | | | |
| SGT20K3_D12 | | | Homo sapiens chromosome 7 clone RP11- |
| | | | 707A19, complete sequence |
| SGT20K3_E10 | solute carrier family 25 (mitochondrial carrier; citrate transporter), | citrate transporter protein - human | Rattus norvegicus solute carrier family 25, |
| | member 1; solute carrier family 20 (mitochondrial citrate | | member 1 (Slc25a1), nuclear gene encoding |
| | transporter), member 3 [Homo sapiens], mRNA sequence | | mitochondrial protein, mRNA |
| | /cds = (99, 1034) /gb = NM_005984/gi = 21389314 /ug = Hs.111024 | | |
| | /len = 1619 | | |
| SGT20K3_G09 | hypothetical protein FLJ25333 [Homo sapiens], mRNA | unnamed protein product [Homo sapiens] | Homo sapiens hypothetical protein FLJ25333 |
| | sequence/cds = (160, 1404) /gb = NM_152548 /gi = 22749142 | | (FLJ25333), mRNA |
| | /ug = Hs.127206/len = 1645 | | |
| SGT20K3_H01 | | | Homo sapiens chromosome 4 clone CTD- |
| | | | 2314I6, complete sequence |
| SGT20K4_C10 | KIAA0409 [Homo sapiens], mRNA sequence /cds = (0, 1394) | RIKEN cDNA 1500003O22 [Mus musculus] | Homo sapiens KIAA0409 protein (KIAA0409), |
| | /gb = AB007869/gi = 2662098 /ug = Hs.5158 /len = 6469 | | mRNA |
| SGT20K4_H08 | solute carrier family 9, member 7; nonselective | solute carrier family 9, member 7; | Homo sapiens solute carrier family 9 |
| | sodiumpotassium/proton exchanger; sodium/hydrogen exchanger | nonselective sodiumpotassium/proton | (sodium/hydrogen exchanger), isoform 7 |
| | 7 [Homo sapiens], mRNA sequence /cds = (8, 2185) | exchanger; sodium/hydrogen exchanger | (SLC9A7), mRNA |
| | /gb = NM_032591/gi = 14211918 /ug = Hs.154353 /len = 2200 | 7 [Homo sapiens] | |
| SGT20L1_A11 | zizimin1 [Homo sapiens], mRNA sequence /cds = (55, 6264) | Unknown (protein for IMAGE: 6156949) [Homo | Mus musculus, Similar to hypothetical protein |
| | /gb = NM_015296/gi = 24308028 /ug = Hs.8021 /len = 7522 | sapiens] | FLJ20220, clone MGC: 11827 IMAGE: 3596515, |
| | | | mRNA, complete cds |
| SGT20L1_C05 | small inducible cytokine A28 precursor; CC chemokine | chemokine CCL28/MEC [Macaca mulatta] | Homo sapiens chemokine (C-C motif) ligand |
| | CCL28; mucosae-associated epithelial chemokine; small | | 28 (CCL28), transcript variant 2, mRNA |
| | inducible cytokine subfamily A (Cys-Cys), member 28 | | |
| | [Homo sapiens], mRNA sequence /cds = (54, 437) | | |
| | /gb = NM_019846/gi = 22538809 /ug = Hs.283090 /len = 1349 | | |
| SGT20L4_E06 | kinesin-related protein [Homo sapiens], mRNA | | Human DNA sequence from clone RP4- |
| | sequence/cds = (1389, 5555) /gb = AB017133 /gi = 15822815 | | 736L20 on chromosome 1p36.12-36.23, |
| | /ug = Hs.375193/len = 8776 | | complete sequence |
| SGT20M3_C02 | | | |
| SGT20M3_E09 | RAB11B, member RAS oncogene family; RAB11B, member of | Similar to RAB11B, member RAS oncogene | Rattus norvegicus RAB11B, member RAS |
| | RAS oncogenefamily [Homo sapiens], mRNA sequence | family [Xenopus laevis] | oncogene family (Rab11b), mRNA |
| | /cds = (6, 662)/gb = NM_004218 /gi = 4758985 /ug = Hs.239018 | | |
| | /len = 701 | | |
| SGT20M4_G11 | | similar to hypothetical protein FLJ10143 [Mus | |
| | | musculus] | |
| SGT20M5_D02 | hypothetical protein 24432 [Homo sapiens], mRNA | Similar to hypothetical protein 24432 [Homo | Homo sapiens hypothetical protein 24432 |
| | sequence/cds = (332, 1957) /gb = NM_022914 /gi = 12597658 | sapiens] | (24432), mRNA |
| | /ug = Hs.78019/len = 2034 | | |
| SGT20M5_G11 | 602345225F1 NIH_MGC_89 Homo sapiens cDNA clone | RIKEN cDNA 1110064A23 [Mus musculus] | Hepatitis C virus gene for polyprotein, |
| | IMAGE: 4455079 5′, mRNA sequence /clone = IMAGE: 4455079 | | complete cds, isolate: HCVT142 |
| | /clone_end = 5′/gb = BG168549 /gi = 12675252 /ug = Hs.421771 | | |
| | /len = 211 | | |
| SGT20M5_H01 | diacylglycerol O-acyltransferase homolog 2; GS1999full | hypothetical protein [Homo sapiens] | Homo sapiens diacylglycerol O- |
| | [Homo sapiens], mRNA sequence /cds = (777, 1670) | | acyltransferase homolog 2 (mouse)(DGAT2), |
| | /gb = NM_032564/gi = 14211870 /ug = Hs.334305 /len = 2713 | | mRNA |
| SGT20N2_D03 | | | Mus musculus chromosome 7 clone RP24- |
| | | | 63N24, complete sequence |
| SGT20N2_H05 | TPA regulated locus; uncharacterized hypothalamus protein | TPARDL [Mus musculus] | Homo sapiens transmembrane protein mRNA, |
| | HTMP[Homo sapiens], mRNA sequence | | complete cds |
| | /cds = (194, 1168)/gb = NM_018475 /gi = 8923860 /ug = Hs.236510 | | |
| | /len = 1913 | | |
| SGT20N3_A01 | | | Homo sapiens TRAM-like protein (KIAA0057), |
| | | | mRNA |
| SGT20N3_A02 | | envelope protein [Caprine nasal tumour virus] | |
| SGT20N3_H03 | | lipopolysaccharide receptor; CD14 [Equus | |
| | | caballus] | |
| SGT20N4_A10 | hypothetical protein FLJ13840 [Homo sapiens], mRNA | hypothetical protein FLJ13840 [Homo | Homo sapiens hypothetical protein FLJ13840 |
| | sequence/cds = (643, 2232) /gb = NM_024746 /gi = 21362001 | sapiens] | (FLJ13840), mRNA |
| | /ug = Hs.123515/len = 2514 | | |
| SGT20N4_E08 | | | |
| SGT20N4_G04 | | | |
| SGT20O1_E03 | ubiquitin specific protease 8 [Homo sapiens], mRNA | hypothetical protein [Homo sapiens] | Homo sapiens ubiquitin specific protease 8 |
| | sequence/cds = (317, 3673) /gb = NM_005154 /gi = 4827053 | | (USP8), mRNA |
| | /ug = Hs.152818/len = 4359 | | |
| SGT20O3_F12 | sirtuin 2, isoform 1; SIR2 (silent mating type information | SIR2L2 [Mus musculus] | Mus musculus sirtuin 2 (silent mating type |
| | regulation2, S. cerevisiae, homolog)-like; sirtuin (silent mating type | | information regulation 2, homolog) 2 (S. cerevisiae) |
| | information regulation 2, S. cerevisiae, homolog) 2; silencing | | (Sirt2), mRNA |
| | information regulator 2-like; SIR2 (silent mating type inform> | | |
| | /cds = (200, 1369) /gb = NM_012237/gi = 13775599 /ug = Hs.375214 | | |
| | /len = 1963 | | |
| SGT20O4_A02 | suppressor of Ty 6 homolog (S. cerevisiae); suppressor of | similar to suppressor of Ty 6 homolog (S. cerevisiae) | Homo sapiens suppressor of Ty 6 homolog (S. cerevisiae) |
| | Ty (S. cerevisiae) 6 homolog [Homo sapiens], mRNA | [Mus musculus] | (SUPT6H), mRNA |
| | sequence/cds = (1164, 5975) /gb = NM_003170 /gi = 11321572 | | |
| | /ug = Hs.12303/len = 6603 | | |
| SGT20O4_G04 | S-adenosylhomocysteine hydrolase; adenosylhomocysteinase | adenosylhomocysteinase [Streptomyces | Mus musculus S-adenosylhomocysteine |
| | [Homo sapiens], mRNA sequence /cds = (47, 1345) | coelicolor A3(2)] | hydrolase (Ahcy), mRNA |
| | /gb = NM_000687/gi = 9951914 /ug = Hs.172673 /len = 2110 | | |
| SGT20O5_D01 | solute carrier family 3 (activators of dibasic and neutral amino | blood-brain barrier large neutral amino acid | Homo sapiens solute carrier family 3 |
| | acid transport), member 2; 4F2; 4T2HC; Antigen identified | transporter heavychain 4F2 [Oryctolagus | (activators of dibasic and neutral amino acid |
| | bymonoclonal antibodies 4F2, TRA1.10, TROP4, and; | cuniculus] | transport), member 2 (SLC3A2), mRNA |
| | antigenidentified by monoclonal antibodies 4F2, TRA1.10, | | |
| | TROP4, and T43 [Homo> /cds = (480, 2069) | | |
| | /gb = NM_002394/gi = 21361343 /ug = Hs.79748 /len = 2188 | | |
| SGT20P1_B06 | | sv8-MUC4 apomucin [Homo sapiens] | |
| SGT20P3_C08 | AGENCOURT_8745191 Lupski_sciatic_nerve Homo sapiens | Early lactation protein | Macropus eugenii mRNA for early lactation |
| | cDNA cloneIMAGE: 6205346 5′, mRNA sequence | | protein (ELP) |
| | /clone = IMAGE: 6205346/clone_end = 5′ /gb = BQ942584 | | |
| | /gi = 22358062 /ug = Hs.401236/len = 895 | | |
| SGT20P3_C09 | | | |
| SGT20P4_E05 | | | |
| SGT20P5_C11 | | | |
| SGT20Q3_B11 | | | |
| SGT20Q3_F06 | | | |
| SGT20Q3_H03 | Homo sapiens solute carrier family 7, (cationic amino | solute carrier family 7, (cationic amino acid | Rattus norvegicus solute carrier family 7, |
| | acid transporter, y+ system) member 10 (SLC7A10), | transporter, y+system) member 10 [Rattus | (cationic amino acid transporter, y+ system) |
| | mRNA/cds = (99, 1670) /gb = NM_019849 /gi = 9790234 | norvegicus] | member 10 (Slc7a10), mRNA |
| | /ug = Hs.58679/len = 1918 | | |
| SGT20Q4_A02 | KIAA1541 protein [Homo sapiens], mRNA sequence | Similar to DNA segment, Chr 7, ERATO Doi | Homo sapiens mRNA for KIAA1541 protein, |
| | /cds = (908, 2341)/gb = AB040974 /gi = 7959348 /ug = Hs.380372 | 753, expressed [Xenopus laevis] | partial cds |
| | /len = 6206 | | |
| SGT20Q4_F08 | hypothetical protein MGC31963 [Homo sapiens], mRNA | kidney predominant protein NCU-G1 [Mus | Mus musculus, RIKEN cDNA 0610031J06 |
| | sequence/cds = (13, 1233) /gb = NM_144580 /gi = 24307870 | musculus] | gene, clone MGC: 27637IMAGE: 4507218, |
| | /ug = Hs.293984/len = 1603 | | mRNA, complete cds |
| SGT20Q4_G04 | | | |
| SGT20Q4_G09 | | | |
| SGT20Q4_H09 | KIAA1668 protein [Homo sapiens], mRNA sequence | hypothetical protein [Homo sapiens] | Mus musculus similar to hypothetical protein |
| | /cds = (0, 2376)/gb = AB051455 /gi = 13359208 /ug = Hs.8535 | | [Homo sapiens](LOC278699), mRNA |
| | /len = 5779 | | |
| SGT20Q5B_A04 | splicing factor 1; zinc finger protein 162 [Homo sapiens], | zinc finger protein 162 [Mus musculus] | Homo sapiens clone B4 transcription factor |
| | mRNA sequence /cds = (382, 2253) /gb = NM_004630 | | ZFM1 mRNA, complete cds |
| | /gi = 4759339/ug = Hs.180677 /len = 3131 | | |
| SGT20Q5B_D03 | | | |
| SGT20R1_A02 | | GM2 activator protein | Mus musculus GM2 ganglioside activator |
| | | | protein (Gm2a), mRNA |
| SGT20R1_B04 | hypothetical protein FLJ23024 [Homo sapiens], mRNA | unnamed protein product [Mus musculus] | Homo sapiens hypothetical protein FLJ23024 |
| | sequence/cds = (7, 846) /gb = NM_024936 /gi = 13376409 | | (FLJ23024), mRNA |
| | /ug = Hs.278945/len = 2083 | | |
| SGT20R2_E12 | | Chain B, Human Zinc-Alpha-2-Glycoprotein | |
| SGT20R2_G07 | Homo sapiens TGFB-induced factor (TALE family homeobox) | TG-interacting factor isoform b; homeobox | Homo sapiens TGFB-induced factor (TALE |
| | (TGIF), mRNA/cds = (303, 1508) /gb = NM_170695 /gi = 24850134 | protein TGIF; 5′-TG-3′interacting factor; TALE | family homeobox) (TGIF), mRNA |
| | /ug = Hs.90077/len = 1992 | homeobox TG-interacting factor; transforming | |
| | | growth factor-beta-induced factor | |
| | | [Homo sapiens] | |
| SGT20R3_B03 | | | Homo sapiens 12q BAC RP11-489P6 |
| | | | (Roswell Park Cancer Institute Human BAC |
| | | | Library) complete sequence |
| SGT20R3_C12 | hypothetical protein FLJ20487 [Homo sapiens], mRNA | hypothetical protein FLJ20487 [Homo | Homo sapiens hypothetical protein FLJ20487 |
| | sequence/cds = (22, 522) /gb = NM_017841 /gi = 8923449 | sapiens] | (FLJ20487), mRNA |
| | /ug = Hs.313247/len = 1250 | | |
| SGT20R3_D04 | | | |
| SGT20R3_H03 | hypothetical protein FLJ23342 [Homo sapiens], mRNA | hypothetical protein [Homo sapiens] | Homo sapiens mRNA; cDNA DKFZp667A213 |
| | sequence/cds = (23, 1546) /gb = NM_024631 /gi = 13375859 | | (from clone DKFZp667A213) |
| | /ug = Hs.38592/len = 2253 | | |
| SGT20R3_H09 | | | |
| SGT20S5_E08 | | | |
| SGT20T3_G12 | alkaline phosphatase precursor (AA −17 to 507) [Homo sapiens], | tissue non-specific alkaline phosphatase | Felis catus alkaline phosphatase (alpl) mRNA, |
| | mRNA sequence /cds = (400, 1974) /gb = X14174 | [Canis familiaris] | complete cds |
| | /gi = 28737/ug = Hs.381706 /len = 2339 | | |
| SGT20U1_A04 | transgelin; smooth muscle protein 22-alpha; 22 kDa actin- | Transgelin (Smooth muscle protein 22-alpha) | Homo sapiens transgelin (TAGLN), mRNA |
| | binding protein; SM22-alpha [Homo sapiens], mRNA | (SM22-alpha) (WS3-10) (22 kDa actin-binding | |
| | sequence/cds = (75, 680) /gb = NM_003186 /gi = 12621918 | protein) | |
| | /ug = Hs.433399/len = 1085 | | |
| SGT20U1_C08 | FLJ00071 protein [Homo sapiens], mRNA sequence | unnamed protein product [Homo sapiens] | Homo sapiens, clone MGC: 8832 |
| | /cds = (3020, 3772)/gb = AK024478 /gi = 10440469 /ug = Hs.7049 | | IMAGE: 3869275, mRNA, complete cds |
| | /len = 4194 | | |
| SGT20U2_F07 | | | |
| SGT20U3_A09 | homeo box D9; homeobox protein Hox-D9; Hox-4.3, mouse, | Similar to homeo box D9 [Homo sapiens] | Mus musculus homeo box D9 (Hoxd9), mRNA |
| | homolog of [Homo sapiens], mRNA sequence | | |
| | /cds = (439, 1467)/gb = NM_014213 /gi = 23397673 /ug = Hs.236646 | | |
| | /len = 2089 | | |
| SGT20U3_A10 | ribophorin I [Homo sapiens], mRNA sequence | ribophorin I [Sus scrofa] | Sus scrofa mRNA for ribophorin I |
| | /cds = (137, 1960)/gb = NM_002950 /gi = 4506674 /ug = Hs.2280 | | |
| | /len = 2397 | | |
| SGT20U3_B05 | | | |
| SGT20U3_C05 | translocase of inner mitochondrial membrane 8 homolog | translocase of inner mitochondrial membrane | Mus musculus translocase of inner |
| | A; deafness/dystonia peptide; translocase of innermitochondrial | 8 homolog A; deafness/dystonia peptide; | mitochondrial membrane 8 homologa (yeast) |
| | membrane 8 (yeast) homolog A [Homo sapiens], mRNA sequence | translocase of innermitochondrial membrane 8 | (Timm8a), mRNA |
| | /cds = (35, 328) /gb = NM_004085/gi = 6138974 /ug = Hs.125565 | (yeast) homolog A [Homo sapiens] | |
| | /len = 1168 | | |
| SGT20U3_D09 | hypothetical protein LOC51234 [Homo sapiens], mRNA | RIKEN cDNA 2610318K02 [Mus musculus] | Mus musculus RIKEN cDNA 2610318K02 |
| | sequence/cds = (71, 622) /gb = NM_016454 /gi = 24475963 | | gene (2610318K02Rik), mRNA |
| | /ug = Hs.250905/len = 1013 | | |
| SGT20U3_F03 | | | |
| SGT20U4_B08 | | similar to capicua protein; capicua [Mus | Homo sapiens chromosome 19 clone CTC- |
| | | musculus] [Rattus norvegicus] | 565M22, complete sequence |
| SGT20U4_H06 | | | |
| SGT20U5_D06 | | | |
| SGT20U5_E09 | | | Plasmodium falciparum 3D7 chromosome 12 |
| | | | section 6 of 9 of the complete sequence |
| SGT20V2_D09 | FLJ00006 protein [Homo sapiens], mRNA sequence | RIKEN cDNA 1810012I01 [Mus musculus] | Homo sapiens hypothetical protein |
| | /cds = (146, 1351)/gb = AK000006 /gi = 7209312 /ug = Hs.22129 | | DJ1042K10.2 (DJ1042K10.2), mRNA |
| | /len = 4219 | | |
| SGT20V2_E09 | | | Human chromosome 14 DNA sequence BAC |
| | | | R-431H16 of library RPCI-11 |
| | | | from chromosome 14 of Homo sapiens |
| | | | (Human), complete sequence |
| SGT20V2_H08 | | TRICHOSURIN PRECURSOR | Trichosurus vulpecula lipocalin trichosurin |
| | | | mRNA, complete cds |
| SGT20V4_A09 | hypothetical protein FLJ23342 [Homo sapiens], mRNA | similar to cDNA sequence BC024479 [Mus | Homo sapiens mRNA; cDNA DKFZp667A213 |
| | sequence/cds = (23, 1546) /gb = NM_024631 /gi = 13375859 | musculus] [Rattus norvegicus] | (from clone DKFZp667A213) |
| | /ug = Hs.38592/len = 2253 | | |
| SGT20V4_D01 | succinate dehydrogenase complex, subunit B, iron sulfur (lp); iron- | unnamed protein product [Mus musculus] | Mus musculus, RIKEN cDNA 0710008N11 |
| | sulfur subunit [Homo sapiens], mRNA sequence/cds = (134, 976) | | gene, clone MGC: 19177IMAGE: 4225025, |
| | /gb = NM_003000 /gi = 9257241 /ug = Hs.64/len = 1100 | | mRNA, complete cds |
| SGT20V4_F10 | | | |
| SGT20V4_G10 | | | Homo sapiens chromosome 19 clone CTD- |
| | | | 3131K8, complete sequence |
| SGT20V4_H06 | hypothetical protein MGC13016 [Homo sapiens], mRNA | unnamed protein product [Mus musculus] | Homo sapiens hypothetical protein MGC13016 |
| | sequence/cds = (38, 745) /gb = NM_032343 /gi = 14150133 | | (MGC13016), mRNA |
| | /ug = Hs.84120 /len = 984 | | |
| SGT20V5_A09 | Homo sapiens cDNA FLJ10946 fis, clone PLACE1000005, mRNA | unnamed protein product [Mus musculus] | Ictalurid herpes virus 1 (channel catfish virus |
| | sequence/gb = AK001808 /gi = 7023310 /ug = Hs.296544 /len = 1753 | | (CCV)), strain aubum 1, complete genome |
| SGT20V5_D11 | | | Rattus norvegicus Flap structure-specific |
| | | | endonuclease 1 (Fen1), mRNA |
| SGT20V5_H02 | | | |
| SGT20W5_A12 | selenoprotein SelM [Homo sapiens], mRNA sequence | Selenoprotein M precursor (SelM protein) | Homo sapiens, clone IMAGE: 3890282, mRNA |
| | /cds = (89, 526)/gb = NM_080430 /gi = 17975596 /ug = Hs.55940 | | |
| | /len = 718 | | |
| SGT20x1_E03 | chaperonin containing TCP1, subunit 3 (gamma); TCP1 (t- | similar to chaperonin subunit 3 (gamma) [Mus | Homo sapiens chaperonin containing TCP1, |
| | complex-1) ring complex, polypeptide 5 [Homo sapiens], mRNA | musculus] [Rattus norvegicus] | subunit 3 (gamma) (CCT3), mRNA |
| | sequence/cds = (0, 1634) /gb = NM_005998 /gi = 5174726 | | |
| | /ug = Hs.1708/len = 1901 | | |
| SGT20x1_C10 | hypothetical protein [Homo sapiens], mRNA sequence | | Human DNA sequence from clone RP5- |
| | /cds = (412, 1617)/gb = AL833978 /gi = 21739573 /ug = Hs.142442 | | 1102M4 on chromosome 1, |
| | /len = 3749 | | complete sequence |

TABLE 4
Group 3 ESTs

| | | Non-redundant protein sequence | |
|---|---|---|---|
| EST clone ID | Unigene match | database match | GenBank match |
| SGT20V5_A04 | | | Homo sapiens chromosome 17, clone RP11- |
| | | | 283C24, complete sequence |
| SGT20V2_D11 | | | |
| SGT20U3_C04 | | | |
| SGT20U3_B07 | CTL2 gene [Homo sapiens], mRNA sequence | unnamed protein product [Mus | Homo sapiens, clone IMAGE: 3848854, |
| | /cds = (0, 2120) /gb = NM_020428/gi = 9966908 | musculus] | mRNA |
| | /ug = Hs.105509 /len = 2121 | | |
| SGT20P1_B04 | | | Homo sapiens 3 BAC RP11-59J16 (Roswell |
| | | | Park Cancer Institute Human BAC Library) |
| | | | complete sequence |
| SGT20O5_E05 | | | |
| SGT20O2_A10 | | | |
| SGT20J6_B06 | | | Mus musculus Strain C57BL6/J Chromosome |
| | | | 11 BAC, RP23-193K14, complete sequence |
| SGT20I6_B01 | | | |
| SGT20I1_A12 | | | Homo sapiens chromosome 16 clone RP11- |
| | | | 107C10, complete sequence |
| SGT20F4_E05 | | | |
| SGT20F1_G12 | | | |

TABLE 5
Group 4 ESTs

| EST clone ID | Unigene match | Non-redundant protein sequence database match | GenBank match |
|---|---|---|---|
| SGT20A1_G07 | Unknown (protein for IMAGE: 4544931) [Homo sapiens] | Homo sapiens cDNA: FLJ22947 fis, clone KAT09234, mRNA | Homo sapiens cDNA: FLJ22947 fis, clone KAT09234 |
| | | sequence/gb = AK026600 /gi = 10439488 /ug = Hs.389624 | |
| | | /len = 861 | |
| SGT20B1_F04 | hypothetical protein XP_238162 [Rattus | protein tyrosine phosphatase, receptor type, f polypeptide | Homo sapiens protein tyrosine phosphatase, receptor |
| | norvegicus] | (PTPRF), interacting protein (liprin), alpha 1 [Homo | type, fpolypeptide (PTPRF), interacting protein (liprin), |
| | | sapiens], mRNA sequence /cds = (229, 3837) /gb = NM_003626 | alpha1 (PPFIA1), mRNA |
| | | /gi = 4505982/ug = Hs.183648 /len = 4313 | |
| SGT20C1_H12 | hypothetical protein MGC30714 [Mus | Homo sapiens cDNA FLJ20201 fis, clone COLF1210, mRNA | Mus musculus, Similar to transmembrane 4 |
| | musculus] | sequence/gb = AK000208 /gi = 7020141 /ug = Hs.27267 | superfamily member (tetraspan NET-7), clone |
| | | /len = 1720 | MGC: 30714 IMAGE: 3981492, mRNA, complete cds |
| SGT20C5_D01 | similar to hypothetical protein [Homo sapiens] | | |
| SGT20D2B_B02 | alpha 2 actin; alpha-cardiac actin [Homo | alpha 2 actin; alpha-cardiac actin [Homo sapiens], mRNA | Homo sapiens actin, alpha 2, smooth muscle, aorta |
| | sapiens] | sequence/cds = (47, 1180)/gb = NM_001613 /gi = 4501882 | (ACTA2), mRNA |
| | | /ug = Hs.195851/len = 1330 | |
| SGT20D3_B06 | ribosomal protein S6 [Mus musculus] | ribosomal protein S6; 40S ribosomal protein S6; | Rattus norvegicus ribosomal protein S6 (Rps6), |
| | | phosphoprotein NP33[Homo sapiens], mRNA sequence | mRNA |
| | | /cds = (42, 791)/gb = NM_001010 /gi = 17158043 /ug = Hs.380843 | |
| | | /len = 829 | |
| SGT20D3_G06 | hypothetical protein [Homo sapiens] | neuronal amiloride-sensitive cation channel 1; degenerin | Homo sapiens amiloride-sensitive cation channel 1, |
| | | [Homo sapiens], mRNA sequence /cds = (274, 1812) | neuronal(degenerin) (ACCN1), mRNA |
| | | /gb = NM_001094/gi = 21536347 /ug = Hs.6517 /len = 2747 | |
| SGT20D4_C07 | hypothetical protein MGC11770 [Mus | hypothetical protein MGC2744 [Homo sapiens], mRNA | Homo sapiens hypothetical protein MGC2744 |
| | musculus] | sequence/cds = (154, 1731) /gb = NM_025267 /gi = 13376885 | (MGC2744), mRNA |
| | | /ug = Hs.317403/len = 1844 | |
| SGT20D5_C07 | My004 protein [Homo sapiens] | HSPC042 protein [Homo sapiens], mRNA sequence | Homo sapiens HSPC042 protein (LOC51122), mRNA |
| | | /cds = (41, 388)/gb = NM_016094 /gi = 7705814 /ug = Hs.265540 | |
| | | /len = 949 | |
| SGT20E1B_C05 | hypothetical protein DKFZp434K1772.1 - | hyothetical protein [Homo sapiens], mRNA sequence | Mus musculus, Similar to hypothetical protein |
| | human (fragment) | /cds = (678, 1952)/gb = NM_019032 /gi = 24308134 | FLJ13710, clone MGC: 28749 IMAGE: 4482484, |
| | | /ug = Hs.96657 /len = 2704 | mRNA, complete cds |
| SGT20E2_E03 | similar to KIAA0560 protein [Homo sapiens] | KIAA0560 protein [Homo sapiens], mRNA sequence | Homo sapiens, clone IMAGE: 5109629, mRNA |
| | | /cds = (42, 4712)/gb = AB011132 /gi = 6635202 /ug = Hs.129952 | |
| | | /len = 5956 | |
| SGT20E2_G07 | hypothetical protein FLJ23751 [Homo sapiens] | hypothetical protein FLJ23751 [Homo sapiens], mRNA | Homo sapiens hypothetical protein FLJ23751 |
| | | sequence/cds = (120, 1562) /gb = NM_152282 /gi = 22748648 | (FLJ23751), mRNA |
| | | /ug = Hs.37443/len = 2994 | |
| SGT20G3_H05 | unnamed protein product [Mus musculus] | Sec23 (S. cerevisiae) homolog B; SEC23-like protein B; | Homo sapiens, clone IMAGE: 3456202, mRNA |
| | | protein transport protein SEC23B; SEC23-related protein | |
| | | B; transport protein Sec23 isoform B [Homo sapiens], | |
| | | mRNA sequence /cds = (112, 2415) /gb = NM_032986 | |
| | | /gi = 16905503/ug = Hs.173497 /len = 2814 | |
| SGT20G4_B10 | hypothetical protein XP_284029 [Mus | Homo sapiens cDNA FLJ38845 fis, clone MESAN2003709, | Homo sapiens chromosome 8, clone CTA-204B4, |
| | musculus] | mRNA sequence/gb = AK096164 /gi = 21755585 | complete sequence |
| | | /ug = Hs.356093 /len = 2289 | |
| SGT20H2_E10 | hypothetical protein FLJ14466 [Homo sapiens] | hypothetical protein FLJ14466 [Homo sapiens], mRNA | Homo sapiens hypothetical protein FLJ14466 |
| | | sequence/cds = (126, 842) /gb = NM_032790 /gi = 14249459 | (FLJ14466), mRNA |
| | | /ug = Hs.55148/len = 1877 | |
| SGT20I6_B05 | hypothetical protein DKFZp434D0127 [Homo | hypothetical protein DKFZp434D0127 [Homo sapiens], | Homo sapiens, hypothetical protein |
| | sapiens] | mRNA sequence/cds = (250, 2388) /gb = NM_032147 | DKFZp434D0127, clone |
| | | /gi = 14149816 /ug = Hs.154848/len = 2871 | MGC: 26981 IMAGE: 4825887, mRNA, complete cds |
| SGT20I6_H05 | unnamed protein product [Mus musculus] | hypothetical protein FLJ12572 [Homo sapiens], mRNA | Homo sapiens cDNA FLJ12572 fis, clone |
| | | sequence/cds = (439, 1620) /gb = NM_022905 /gi = 21362085 | NT2RM4000971 |
| | | /ug = Hs.139709/len = 3599 | |
| SGT20J1_C07 | hypothetical protein DKFZp586D0920.1 - | E1B-55 kDa-associated protein 5 isoform a [Homo sapiens], | Homo sapiens E1B-55 kDa-associated protein 5 (E1B- |
| | human (fragment) | mRNA sequence /cds = (173, 2743) /gb = NM_007040 | AP5), transcript variant 3, mRNA |
| | | /gi = 21536325/ug = Hs.155218 /len = 3872 | |
| SGT20K2_C10 | hypothetical protein XP_164784 [Mus | | |
| | musculus] | | |
| SGT20K3_B07 | hypothetical protein DKFZp564D0478 [Homo | hypothetical protein DKFZp564D0478 [Homo sapiens], | Homo sapiens hypothetical protein SB71 mRNA, |
| | sapiens] | mRNA sequence/cds = (27, 593) /gb = NM_032125 | complete cds |
| | | /gi = 14149778 /ug = Hs.321214/len = 1547 | |
| SGT20K4_C03 | similar to hypothetical protein MGC14327 | hypothetical protein MGC14327 [Homo sapiens], mRNA | Homo sapiens hypothetical protein MGC14327 |
| | [Homo sapiens] [Rattus norvegicus] | sequence/cds = (224, 634) /gb = NM_053045 /gi = 16596685 | (MGC14327), mRNA |
| | | /ug = Hs.231029/len = 1576 | |
| SGT20K4_G06 | unnamed protein product [Mus musculus] | NPD002 protein [Homo sapiens], mRNA sequence | Mus musculus similar to NPD002 protein [Homo |
| | | /cds = (88, 1953)/gb = NM_014049 /gi = 21361496 /ug = Hs.7010 | sapiens] (LOC229211), mRNA |
| | | /len = 2494 | |
| SGT20M5_C08 | hypothetical protein LOC92922 [Homo sapiens] | hypothetical protein MGC13119 [Homo sapiens], mRNA | Homo sapiens hypothetical gene supported by |
| | | sequence/cds = (222, 1874) /gb = NM_033212 /gi = 15082249 | BC004307; BC008285(MGC10992), mRNA |
| | | /ug = Hs.129126/len = 2470 | |
| SGT20N1_G01 | unnamed protein product [Mus musculus] | ribosomal protein S24 isoform a; 40S ribosomal protein S24 | Homo sapiens ribosomal protein S24 (RPS24), |
| | | [Homo sapiens], mRNA sequence /cds = (37, 429) | transcript variant 1, mRNA |
| | | /gb = NM_033022/gi = 14916500 /ug = Hs.180450 /len = 537 | |
| SGT20N4_G07 | ribosomal protein S3 [Mus musculus] | myo-inositol 1-phosphate synthase A1 [Homo sapiens], | Homo sapiens, ribosomal protein S3, clone |
| | | mRNA sequence/cds = (48, 1724) /gb = BC017189 | MGC: 32779 IMAGE: 4665438, mRNA, complete cds |
| | | /gi = 16877928 /ug = Hs.381118/len = 2760 | |
| SGT20Q5B_G02 | Similar to hypothetical protein dJ37E16.5 | hypothetical protein dJ37E16.5 [Homo sapiens], mRNA | Homo sapiens hypothetical protein dJ37E16.5 |
| | [Homo sapiens] | sequence/cds = (61, 951) /gb = NM_020315 /gi = 19923561 | (DJ37E16.5), mRNA |
| | | /ug = Hs.5790/len = 2053 | |
| SGT20R2_B09 | similar to hypothetical protein RP1-317E23 | hypothetical protein RP1-317E23 [Homo sapiens], mRNA | Homo sapiens hypothetical protein RP1-317E23 |
| | [Homo sapiens] | sequence/cds = (310, 1188) /gb = NM_019557 /gi = 24475811 | (LOC56181), mRNA |
| | | /ug = Hs.323396/len = 2119 | |
| SGT20T3_G11 | Unknown (protein for MGC: 32686) [Homo | Unknown (protein for MGC: 32686) [Homo sapiens], mRNA | Homo sapiens, clone MGC: 32686 IMAGE: 4051739, |
| | sapiens] | sequence/cds = (75, 491) /gb = BC029430 /gi = 20810228 | mRNA, complete cds |
| | | /ug = Hs.44205/len = 824 | |
| SGT20T4_D12 | similar to hypothetical protein MGC4266 [Homo | | Homo sapiens cDNA FLJ90699 fis, clone |
| | sapiens] [Rattus norvegicus] | | PLACE1007040 |
| SGT20T5_F01 | unnamed protein product [Mus musculus] | osteoblast specific factor 2 (fasciclin I-like) [Homo sapiens], | Homo sapiens osteoblast specific factor 2 (fasciclin I- |
| | | mRNA sequence /cds = (11, 2521) /gb = NM_006475 | like) (OSF-2), mRNA |
| | | /gi = 5453833 /ug = Hs.136348 /len = 3213 | |
| SGT20U1_G06 | N-myc downstream-regulated gene 2 [Rattus | Homo sapiens, clone IMAGE: 4156252, mRNA, mRNA | Homo sapiens NDRG family member 2 (NDRG2), |
| | norvegicus] | sequence /gb = BC013209/gi = 15301454 /ug = Hs.400790 | mRNA |
| | | /len = 2731 | |
| SGT20U5_E01 | unnamed protein product [Mus musculus] | Similar to hypothetical protein FLJ22405 [Homo sapiens], | Homo sapiens clone pp8153 unknown mRNA |
| | | mRNA sequence /cds = (63, 2015) /gb = BC035690 | |
| | | /gi = 23274205/ug = Hs.406601 /len = 2500 | |

TABLE 6
Group 5 ESTs

| | | Non-redundant protein sequence database | |
|---|---|---|---|
| EST clone ID | Unigene match | match | GenBank match |
| SGT20B1_C12 | Homo sapiens mRNA; cDNA DKFZp666J217 (from | hypothetical protein DKFZp566N034 [Homo | Homo sapiens hypothetical protein |
| | clone DKFZp666J217), mRNA sequence /gb = AL833765 | sapiens] | DKFZp566N034 (DKFZP566N034), mRNA |
| | /gi = 21734415 /ug = Hs.331633/len = 5097 | | |
| SGT20C3_G04 | hypothetical protein IMAGE3455200 [Homo sapiens], | similar to hypothetical protein IMAGE3455200 | Homo sapiens, clone IMAGE: 3455200, mRNA |
| | mRNA sequence/cds = (47, 538) /gb = NM_024006 | [Homo sapiens] [Rattus norvegicus] | |
| | /gi = 13124769 /ug = Hs.324844/len = 871 | | |
| SGT20D3_H05 | | hypothetical protein FLJ12089 [Homo sapiens] | |
| SGT20E2_D10 | unknown [Homo sapiens], mRNA sequence | unknown [Homo sapiens] | Mus musculus prion protein interacting protein 1 |
| | /cds = (0, 1195) /gb = AF007157/gi = 2852639 | | (Pmpip1), mRNA |
| | /ug = Hs.151032 /len = 1710 | | |
| SGT20H3_B08 | accessory protein BAP31 [Homo sapiens], mRNA | similar to B-cell receptor-associated protein 31 | Homo sapiens accessory protein BAP31 |
| | sequence/cds = (136, 876) /gb = NM_005745 | [Mus musculus] [Rattus norvegicus] | (DXS1357E), mRNA |
| | /gi = 10047078 /ug = Hs.291904/len = 1314 | | |
| SGT20I6_D09 | KIAA0710 gene product [Homo sapiens], mRNA | 1200014O24Rik protein [Mus musculus] | Homo sapiens, KIAA0710 gene product, clone |
| | sequence /cds = (203, 3550)/gb = NM_014871 | | MGC: 1971 IMAGE: 3357890, mRNA, complete |
| | /gi = 7662257 /ug = Hs.273397 /len = 4607 | | cds |
| SGT20J6_C08 | apoptosis related protein APR-3; p18 protein [Homo | Unknown (protein for MGC: 13322) [Homo | Homo sapiens HSPC013 mRNA, complete cds |
| | sapiens], mRNA sequence /cds = (335, 850) | sapiens] | |
| | /gb = NM_016085 /gi = 18105011/ug = Hs.9527 /len = 1086 | | |
| SGT20J6_F11 | hypothetical protein CAB56184 [Homo sapiens], mRNA | hypothetical protein CAB56184 [Homo sapiens] | Mus musculus similar to hypothetical protein |
| | sequence/cds = (0, 917) /gb = NM_032520 /gi = 14249737 | | CAB56184 [Homo sapiens] (LOC214505), mRNA |
| | /ug = Hs.241575/len = 918 | | |
| SGT20K3_B06 | FLJ00196 protein [Homo sapiens], mRNA sequence | Lcn7 protein [Mus musculus] | Mus musculus, clone MGC: 11828 |
| | /cds = (1839, 2693)/gb = AK074124 /gi = 18676595 | | IMAGE: 3596560, mRNA, complete cds |
| | /ug = Hs.173508 /len = 4761 | | |
| SGT20L4_A12 | sterol carrier protein 2 [Homo sapiens], mRNA | Nonspecific lipid-transfer protein, mitochondrial precursor (NSL-TP) | Oryctolagus cuniculus sterol carrier protein X |
| | sequence /cds = (21, 1664)/gb = NM_002979 | (Sterol carrier protein 2) | (SCP2) mRNA, complete cds |
| | /gi = 19923232 /ug = Hs.75760 /len = 2572 | (SCP-2) (Sterol carrier protein X) (SCP-X) | |
| | | (SCPX) | |
| SGT20L4_H04 | 602268464F1 NIH_MGC_81 Homo sapiens cDNA clone | Unknown (protein for MGC: 64538) [Xenopus | Homo sapiens interferon induced |
| | IMAGE: 4356734 5′, mRNA sequence | laevis] | transmembrane protein 3 (1-8U) (IFITM3), mRNA |
| | /clone = IMAGE: 4356734 /clone_end = 5′/gb = BF965170 | | |
| | /gi = 12332385 /ug = Hs.433414 /len = 1549 | | |
| SGT20N3_F12 | presenilins associated rhomboid-like protein; | presenilins associated rhomboid-like protein | Homo sapiens PRO2207 mRNA, complete cds |
| | hypotheilcal protein PRO2207 [Homo sapiens], mRNA | [Homo sapiens] | |
| | sequence /cds = (29, 1168)/gb = NM_018622 | | |
| | /gi = 20127651 /ug = Hs.13094 /len = 1393 | | |
| SGT20N4_E01 | stromal cell-derived factor 2 precursor [Homo sapiens], | similar to stromal cell-derived factor 2 precursor | Homo sapiens, Similar to stromal cell-derived |
| | mRNA sequence /cds = (39, 674) /gb = NM_006923 | [Homo sapiens] [Rattus norvegicus] | factor 2, clone MGC: 2977 IMAGE: 3140716, |
| | /gi = 14141194/ug = Hs.118684 /len = 1075 | | mRNA, complete cds |
| SGT20O1_D01 | nucleotide binding protein 2 (MinD homolog, E. coli); | nucleotide binding protein 2 [Mus musculus] | Mus musculus, Similar to nucleotide binding |
| | nucleotide binding protein 2 (E. coli MinD like) [Homo | | protein 2, clone MGC: 13715 IMAGE: 4038123, |
| | sapiens], mRNA sequence /cds = (63, 878) | | mRNA, complete cds |
| | /gb = NM_012225 /gi = 6912539/ug = Hs.256549 /len = 1351 | | |
| SGT20O5_G11 | Homo sapiens cDNA FLJ32555 fis, clone | Unknown (protein for IMAGE: 6879877) | Mus musculus, signal sequence receptor, delta, |
| | SPLEN1000116, moderately similar to TRANSLOCON- | [Xenopus laevis] | clone MGC: 6004 IMAGE: 3481948, mRNA, |
| | ASSOCIATED PROTEIN, DELTA | | complete cds |
| | SUBUNIT PRECURSOR, mRNA sequence | | |
| | /gb = AK057117 /gi = 16552704/ug = Hs.102135 /len = 2481 | | |
| SGT20P2_B04 | | Prostatic spermine-binding protein precursor | |
| | | (SBP) | |
| SGT20Q4_F02 | Homo sapiens cDNA FLJ37835 fis, clone | AES-1 protein-human (fragment) | Homo sapiens amino-terminal enhancer of split |
| | BRSSN2010110, weakly similar toGRG PROTEIN, | | (AES), mRNA |
| | mRNA sequence /gb = AK095154 | | |
| | /gi = 21754354/ug = Hs.375592 /len = 3276 | | |
| SGT20Q6_A08 | | ZW10 interactor (ZW10 interacting protein-1) | |
| | | (Zwint-1) | |
| SGT20Q6_B07 | SON DNA-binding protein isoform E; NRE-binding | unnamed protein product [Mus musculus] | Mus musculus Son cell proliferation protein |
| | protein; chromosome 21 open reading frame 50; SON | | (Son), mRNA |
| | protein; negative regulatory element-binding protein; Bax | | |
| | antagonist selected in Saccharomyces 1 [Homo | | |
| | sapiens], mRNA sequence/cds = (49, 6375) | | |
| | /gb = NM_058183 /gi = 21040317 /ug = Hs.92909/len = 8482 | | |
| SGT20Q6_E03 | hypothetical protein MGC32124 [Homo sapiens], mRNA | hypothetical protein MGC32124 [Homo sapiens] | Homo sapiens hypothetical protein MGC32124 |
| | sequence/cds = (40, 834) /gb = NM_144611 /gi = 21389420 | | (MGC32124), mRNA |
| | /ug = Hs.284163/len = 1370 | | |
| SGT20Q6_G05 | endothelial PAS domain protein 1 [Homo sapiens], | endothelial PAS domain protein 1 [Bos taurus] | Bos taurus mRNA for endothelial PAS domain |
| | mRNA sequence/cds = (149, 2761) /gb = NM_001430 | | protein1/hypoxia-inducible factor-2 alpha, |
| | /gi = 4503576 /ug = Hs.374409/len = 2818 | | complete cds |
| SGT20R3_B11 | nudix (nucleoside diphosphate linked moiety X)-type | nudix (nucleoside diphosphate linked moiety X)- | Homo sapiens nudix (nucleoside diphosphate |
| | mofif 9; ADP-ribose pyrosphosphatase NUDT9 [Homo | type motif 9 [Mus musculus] | linked moiety X)-type motif 9 (NUDT9), mRNA |
| | sapiens], mRNA sequence /cds = (325, 1377) | | |
| | /gb = NM_024047 /gi = 20127621/ug = Hs.301789 | | |
| | /len = 1718 | | |
| SGT20R4_C09 | Homo sapiens mRNA; cDNA DKFZp686P07111 (from | jumonji domain containing 1; zinc finger protein; | Homo sapiens zinc finger protein (TSGA), mRNA |
| | clone DKFZp686P07111), mRNA sequence | testis-specific protein A [Homo sapiens] | |
| | /gb = AL832150 /gi = 21732694 /ug = Hs.321707/len = 6587 | | |
| SGT20S1_B03 | NICE-3 protein [Homo sapiens], mRNA sequence | Similar to DKFZP586G1722 protein [Homo | Homo sapiens, Similar to DKFZP586G1722 |
| | /cds = (210, 869)/gb = NM_015449 /gi = 14149687 | sapiens] | protein, clone MGC: 5332 IMAGE: 2901006, |
| | /ug = Hs.355906 /len = 1636 | | mRNA, complete cds |
| SGT20S5_F10 | | | |
| SGT20T3_B11 | | cysteine-rich protein 2; Cystein-rich intestinal | Rattus norvegicus cysteine rich protein 2 |
| | | protein [Homo sapiens] | (Csrp2), mRNA |
| SGT20T5_E09 | ras homolog gene family, member A; Ras homolog gene | ras homolog gene family, member A; Aplysia | Homo sapiens ras homolog gene family, |
| | family, memberA (oncogene RHO H12); Aplysia ras- | ras-related homolog 12; Rho12; RhoA; Ras | member A (ARHA), mRNA |
| | related homolog 12; Rho12; RhoA [Homo sapiens], | homolog gene family, member A (oncogene RHO | |
| | mRNA sequence /cds = (151, 732)/gb = NM_001664 | H12) [Homo sapiens] | |
| | /gi = 10835048 /ug = Hs.77273 /len = 1777 | | |
| SGT20U3_E10 | CGI-135 protein [Homo sapiens], mRNA sequence | Chain A, Solution Structure Of Rsgi Ruh-001, A | Mus musculus, RIKEN cDNA 2010003O14 |
| | /cds = (81, 539)/gb = NM_016068 /gi = 7705631 | Fis1p-Like And Cgi-135 Homologous Domain | gene, clone MGC: 18717 IMAGE: 4221162, |
| | /ug = Hs.423968 /len = 735 | From A Mouse Cdna | mRNA, complete cds |
| SGT20W5_E11 | RelA-associated inhibitor [Homo sapiens], mRNA | Unknown (protein for IMAGE: 4413052) [Homo | Mus musculus similar to RelA-associated |
| | sequence/cds = (943, 1998) /gb = NM_006663 | sapiens] | inhibitor [Homo sapiens](LOC243869), mRNA |
| | /gi = 5730000 /ug = Hs.324051/len = 2620 | | |

### Example 5

### Three Lactation-Associated Polynucleotide and Polypeptide Sequences

[0142] By way of exemplification, the following data for three lactation-associated sequences identified herein is illustrative of the results obtained for lactation-associated sequences in the present study. The three clones are designated SGT20R3_C12, SGT20R1_B04 and SGT20K1_B08 (each belonging to Group 2 as described in Example 4).

RNA, translated peptide sequence and leader sequence prediction of candidate
genes
SGT20R3_C12
CACGCAGCACGCACGCGCGCCCAGAGCCGCCTCTCCCACCTCCCCTCCGAGGCCTCTCGGGCTCGTCGGGGCCTGCGGGA
GGTCCCCGGATGTGGTGAGCAGACGGGCTTCCGGCCGGGCCTGAGCGGAAATGGCGGCGGCGGCGGCGGCGGCTGCAGCT
GCTCCCGCAGTTCGGCTTCTTGCCTTGTCCAGGCACACTCTTGTGTCTCCCTTTGTGGCTAGTTCACTGTTGAGACGATT
CTACCGAGGGGACAGCCCATCAGACTCTCAAAAGGATATGCTTGAAATCCCCTTACCCCCATGGGAAGAGCGAACAGATG
AACCCATTGAAACCAAGAGGGCTCGCCTGCTTTATGAGAGCAGAAAAAGAGGCATGCTGGAGAACTGCATCCTGCTCAGT
CTCTTTGCCAAGGAGAATCTACAGCAAATGACGGAGAGGCAGCTGAACCTCTACGACCGGCTAATCAATGAGCCCAGTAA
TGACTGGGATATCTACTACTGGGCGACAGAAGCAAAGCCAGCCCCCCAAGGTCTTGAAAACGATGTCATGGTGATGCTGA
GAGACTTTGCTAAGAACANAAAGAAAGAGCAGAGGTTGCGGGCCCCAGATCTCGAGTACCTCTTTGAGAAACCAGCCTGA
GCTCCATTCTGGCCTGACCCGCAGGCAGGGCCCTGCANGGACACAGTAGACCCCGGTCACCTGCTGCTTNCCACTACCAT
CCCAGAGCATGGTCTCACTCACGTCATGTCTCAGAAAAGGACTCCTTGTGTCT
peptide prediction
MAAAAAAAAAAPAVRLLALSRHTLVSPFVASSLLRRFYRGDSPSDSQKDMLEIPLPPWEERTDEPIETKRARLLYESRKR
GMLENCILLSLFAKENLQQMIERQLNLYDRLINEPSNDWDIYYWATEAKPAPKVFENDVMVMLRDFAKNXKKEQRLRAPD
LEYLFEKPA
localisation prediction: Signal Peptide
SGT20R1_B04
CAGGGAAAGTTTTCTTTGATAATTTCGTGGAAGATAATGTCTAGGCTCTTTTTTTTTTGATCATGGCTTTCTAGTGACAA
TTTATTGCATTGTAGGCCTCCTTGTCACCAGATTAAAAATTAACTGTTGCTTTTTTCATAGTTATTTAATAAAATGGCTT
TTCTTAATTTGCTTTAATTTATAACTTTTTATTGAAGTTTTTACATTTATTTGTTGATTTTAATAACAATGTATGTTCTT
TTATTTAAATAAATTCTTATGCTTACATTTTCAACTTTCTAGGTAGATTATGATAATCATGCACTTTTTAAATATGGAAA
AACAGGTAAAAAAAAATCTCCTGTGCGTATTTTCACCAATATTCCTCCCAGAAAAATAATTCTTCCAGCAGAAGAAGGAT
ACAGGTTTTGTACTGTGTGTCAGCGTTATGTTTCTTTAGAGAACCAGCACTGTGAGATCTGCAATTCATGTACGTCTAAG
GATGGCAGGAGGTGGAAGCATTGCCTTCTTTGCAAAAAATGTGTCAAGCCCTCTTGGATTCACTGCAGCATTTGCAATTA
CTGTGCCCTTCCAATCATTCATGTGCAGATGCTAAAGATGGTTGCTTTATATGTGGTGAAGTAGATCACANACGTAGTAT
GTGTCCTAATTTCTCTGCATCTAANNAGAGCTACANGGCTGTCAGGAGACAGAAGCCAAAAAAAAAGTAACCAGATTGAA
ATGGAGACCACTAAAGGACCATCTATGAATCATGCAG
peptide prediction
MAGGGSIAFFAKNVSSPLGFTAAFAITVPFQSFSADAKDGCFICGEVDHXVVCVLISLHLXRATXLSGDRSQKKSNQIEM
ETTKGPSMNHAX
localisation prediction: Mitochondrial Transit Peptide
SGT20K1_B08
TCTGGCCTTGCTAAACCTGGCCTGTATGATGATTATTACTTTCTTGCCATACACGTTTTCCTTAATGGCCTCCTTTCCTG
ATGTGCCTTTGGGTATTTTCCTGTTTTGCATTTGTGTCATTGCCATTGGCCTCAGTCAGGCAGCAATTGTGACCTATGGG
TTCCATTACCCATACTTACTGAATCGCCAGATCCGACAGTCAGAGAACAAGGCCTTCTACAAGCACCATATCTTAAATAT
TATACTCAGGGGGCCAGCCCTGTGCTTTTTTGCGGCCATCTTCTCCTTTTTCTTTTTTCCTGTGTCTTACCTCCTTCTTG
GCCTTGTCATCTTCCTCCCCTACATCAATAGATTCATCACGTGGTGCAGAGACAAACTTGTTGGTACCAAATCAGAAGAG
CAACCTCAGAGCTTAGAGTTTTTTACTTTTAATATCCATGAACCCCTAAGTAAGGAGCGAGTAGAAGCCTTCAGTGATGG
TGTGTATGCCATTGTAGCAACCCTCCTCATCCTGGACATTTGTGAGGATAATGTTCCTGATGCCAAAGAAGTTAAAGAAA
AATTTCATGGTGACCTTGTTGAAGCACTGAGAGAATATGGACCAAACTTCCTGCCCTATTTTGCGCTCCTTTGTAACCAT
TGGTCTCCTGTGGCTTGTCCACCACTCCCTCTTTCTTCATGTGAGAAAGACAACCCAGNTCATGGGCCTG
peptide prediction
SGLAKPGLYDDYYFLAITFSLMASFPDVPLGIFLFCICVIAIGLSQAAIVTYGFHYPYLLNRQIRQSENKAFYKHHILNI
ILRGPALCFFAAIFSFFFFPVSYLLLGLVIFLPYINRFITWCRDKLVGTKSEEQPQSLEFFTFNIHEPLSKERVEAFSDG
VYAIVATLLILDICEDNVPDAKEVKEKFHGDLVEALREYGPNFLPYFALLCNHWSPVACPPLPLSSCEKDNPXHGPX
localisation prediction: Other

Blast hits of 3 candidate genes

| EST Clone ID | Unigene | Non Redundant Protein | Genbank |
|---|---|---|---|
| SGT20K1_B08 | hypothetical protein MGC4618 [Homo | unnamed protein product [Mus | Mus musculus, RIKEN |
| | sapiens], mRNA | musculus] | cDNA 3010001K23 gene, |
| | sequence/cds = (107, 1621)/ | | clone |
| | gb = NM_032326/gi = 14150103/ | | MGC:8187IMAGE:3590497, |
| | ug = Hs.89072/len = 1818 | | mRNA, complete cds |
| SGT20R1_B04 | hypothetical protein FLJ23024 [Homo | unnamed protein product [Mus | Homo sapiens hypothetical |
| | sapiens], mRNA sequence/cds = (7, 846)/ | musculus] | protein FLJ23024 |
| | gb = NM_024936/gi = 13376409/ | | (FLJ23024), mRNA |
| | ug = Hs.278945/len = 2083 | | |
| SGT20R3_C12 | hypothetical protein FLJ20487 [Homo | hypothetical protein FLJ20487 | Homo sapiens hypothetical |
| | sapiens], mRNA | [Homo sapiens] | protein FLJ20487 |
| | sequence/cds = (22, 522)/ | | (FLJ20487), mRNA |
| | gb = NM_017841/gi = 8923449/ | | |
| | ug = Hs.313247/len = 1250 | | |

Normalised average intensities of microarray spots of candidate genes

| | day −21 | day −4 | day −1 | day 1 | day 5 | day 80 | day 130 | day 168 | day 213 | day 220 | day 260 |
|---|---|---|---|---|---|---|---|---|---|---|---|
| SGT20r3_C12 | 435 | 10120 | 7329 | 9560 | 9392 | 12296 | 48821 | 64342 | 55262 | 50417 | 75551 |
| SGT20r1_B04 | 175 | 2614 | 3029 | 1932 | 2509 | 4388 | 12595 | 13524 | 9253 | 16839 | 16585 |
| SGT20k1_B08 | 238 | 4112 | 4049 | 3256 | 3745 | 6041 | 19800 | 19738 | 18028 | 26733 | 21082 |

A graph of this data is shown in FIG. 4. This shows the normalized spot intensities for each EST from 21 days before parturition (day five pregnant) to day 260 of lactation. Each of SGT20R3_C12, SGT20R1_B04 and SGT20K1_B08 showed at least a 5-fold increase in expression across at least one phase change in lactation.

### Example 6

### Isolation of Secreted Polypeptides

[0143] Plasmids containing ESTs directionally cloned into the expression vector pCMV Sport 6.0 were transfected into the human kidney cell line HK293. A total of 1 ug of EST plasmid DNA and 10 ng of pEGFP-C1 plasmid was introduced into 70% confluent HK293 cells in 2 cm² wells containing 500 ul of opti-MEM-1 media. Transfection success was assessed by observing green fluorescence of cells by fluorescent microscopy. After 48 hours conditioned media containing the secreted peptide was collected and frozen at −20° C. The media containing the secreted polypeptides can then be used directly in a number of bioactivity assays, including those described below.

### Example 7

### Assays for Biological Activity of Secreted Polypeptides

[0144] Samples of the secreted polypeptides prepared according to Example 6 can be used in a variety of assays in screening for biological activity. The assays may be high-throughput screening assays.

[0145] In accordance with the best mode of performing the invention provided herein, specific examples of biological activity assays are outlined below. The following are to be construed as merely illustrative examples of assays and not as a limitation of the scope of the present invention in any way.

[0146] Typically samples of secreted polypeptides will be aliquoted into individual wells of a 96 or 384 well plate and stored prior to assaying either frozen or lyophilized.

### Example 7A

### Assay for Cell Growth-Promoting Activity

[0147] Extracellular signal-regulated protein kinase (ERK) is a common and central signal transduction pathway component of tyrosine kinase receptor. Activation of ERK is indicative of an extracellular proliferation signal and provides an index of a growth promoting agent.

[0148] Swiss 3T3 fibroblast cells were plated into 384 well plates, grown to confluence and starved overnight with serum-free medium. Cells were then treated for 10 minutes with the secreted polypeptide samples. Cells were then lysed and assayed for activation of ERK. Samples were assessed for changes in the activity of ERK. Activation of ERK by increasing concentrations of betacellulin was used a positive control in each case (data not shown).

[0149] The results of ERK activation assays are shown in FIG. 3 as RFU (relative fluorescence units) produced by each sample. A number of clones produced levels of ERK activation significantly above the mean, indicating a growth-promoting activity. Those of most significance are indicated by black bars in FIG. 3, with activation greater than or equal to 3 standard deviations above the mean.

### Example 7B

### Cell Viability Assay to Assess Anti-Apoptotic Effects

[0150] Vinblastine is a commonly used cytotoxic agent used in chemotherapy. It induces apoptosis in a wide variety of cell types. Caspase activation and DNA fragmentation are hallmarks of the apoptotic process.

[0151] Aliquots of the secreted polypeptide samples in 96 well plates can be pipetted onto HSC-2 oral epithelial cells and cells left for 24 hours. After this time, cells are treated with vinblastine to induce apoptosis. After 48 hours, cells are analyzed for survival using a vital dye. Internal controls for the activation of apoptosis may use 7×96 well plates of cells to assess all samples and controls. Cell survival measurements with this technique reflect the degree of apoptosis. If desired, other more direct assays of apoptosis, such as caspase activation or DNA fragmentation can be undertaken to verify the data obtained.

### Example 7C

### Cell Viability Assay to Assess Pro-Apoptotic Effects

[0152] Using the same method of assaying cell viability as indicated in Example 7B, the secreted polypeptide samples can be pipetted onto HSC-2 cells and the degree of cell viability 48 hours later assessed. Internal controls for induction of cell death via apoptosis as well as assay performance are typically also included on each plate.

### Example 7D

### Assay for Pro-Inflammatory Activity

[0153] p38 MAP kinase (MAPK) is also known as Mitogen-Activated Protein Kinase 14, MAP Kinase p38, p38 alpha, Stress Activated Protein Kinase 2A (SAPK2A), RK, MX12, CSBP1 and CSBP2. p38 is involved in a signaling system that controls cellular responses to cytokines and stress and p38 MAP Kinase is activated by a range of cellular stimuli including osmotic shock, lipopolysaccharides (LPS), inflammatory cytokines, UV light and growth factors.

[0154] RAW macrophage cells can be plated into 384 well plates, grown to confluence, starved for 3 hours with serum-reduced medium, and then treated for 30 minutes with the secreted polypeptide samples. Cells are then lysed and assayed for p38 mitogen-activated protein kinase (MAPK) activation. Internal controls for cell activation of p38 MAPK and assay performance are typically also included in unused wells.

### Example 7E

### Assay for Anti-Inflammatory Activity

[0155] RAW macrophage cells can be grown in 384 well plates, as described above, pre-treated with secreted polypeptide samples for 30 minutes. The cells are then treated with LPS (lipopolysaccharide) for 30 minutes to stimulate p38 MAPK. After this time, cells are lysed and assayed for p38 MAPK activation. Internal controls for cell activation of p38 MAPK and assay performance are typically also included in unused wells.

### Example 7F

### Assay for Increased Protein Secretion

### ³⁵S-Methionine Protein Synthesis Assay

[0156] Bovine mammary epithelial cells can be plated onto extracellular matrix in 96 well plates. After 5 days in culture, cells are incubated in methionine free medium for 1 h and then labeled with ³⁵S-methionine for a 4 h period. Cells are exposed to the expressed peptides during this time. Cell media is then collected and protein precipitated from the media. Cells are also harvested. Cell extracts and protein precipitated from the media are then counted using liquid scintillation counting. This enables both cellular and secreted protein synthesis to be determined relative to an appropriate control.

### Example 7G

### Antibacterial Assays

[0157] Bacteria can be cultured in the presence of the conditioned media, and the effects on growth and viability of the organisms assessed. Target organisms can include human pathogens such as Helicobacter pylori, which is the major cause of gastric ulcers and gastric cancer.

### Example 7H

### Induction of Trefoil Proteins

[0158] Trefoil proteins have been demonstrated to significantly accelerate gut repair after infection and injury. The intestinal epithelial cell line AGS can be transfected with a GFP reporter gene under the control of the trefoil gene promoter. Cells will be exposed to secreted proteins and promoter activity determined by GFP fluorescence.

### Example 7I

### Regulation of Cell Fate and Differentiation

[0159] A significant requirement for stem cell therapeutics and cloning is to manipulate pluripotency and differentiation in vitro. The OCT4 gene is a characterized marker for pluripotency.

[0160] Mouse embryonic stem cells will be cultured in the presence of the secreted peptides and cellular differentiation microscopically. Cell lines with the GFP reporter gene under the control of the OCT4 promoter will be exposed to secreted proteins and promoter activity determined by GFP fluorescence.

### Example 7J

### Regulation of Cell Fate and Differentiation

[0161] The morphology of mammary epithelium changes significantly as it moves from a non-milk secreting epithelium to a highly secretory epithelium. Polypeptides able to regulate the function and differentiation of the mammary gland can be screened by culturing primary mammary epithelium in the presence of the secreted polypeptides. Cells will be examined microscopically for gross morphological changes.

[0162] Secreted polypeptides with growth promoting activity (example 7A), pro and anti-apoptotic effects (Examples 7C and 7B respectively), able to influence the differentiation of mammary epithelium (present Example), or able to effect the level of protein secretion (Example 7F) may regulate mammary gland physiology and the duration and degree of milk production.

[0163] Polypeptides with antibacterial properties (Example 7G), or anti or pro inflammatory properties (Examples 7E or 7D respectively) potentially influence the susceptibility and degree of mastitis.

1.-24. (canceled)

25. A peptide comprising an amino acid sequence represented by SEQ ID NO: 370.

26. A peptide having at least 75% amino acid homology with the peptide according to claim 25.

27. A peptide having at least 85% amino acid homology with the peptide according to claim 25.

28. A peptide having at least 90% amino acid homology with the peptide according to claim 25.

29. A peptide having at least 95% amino acid homology with the peptide according to claim 25.

30. A peptide having at least 99% amino acid homology with the peptide according to claim 25.

31. A peptide comprising an amino acid sequence that only differs from SEQ ID NO: 370 in the conservative substitution of one or more amino acids.

32. A bovine homologue of a peptide comprising an amino acid sequence represented by SEQ ID NO: 370.

33. A host cell that contains the peptide according to claim 26.

34. A composition comprising a peptide according to claim 26 together with one or more pharmaceutically acceptable carriers, diluents or adjuvants.

The application's sequence listing, which the Patent Office published only in electronic form, follows.

SEQUENCE LISTING (502 sequences)

SEQ ID NO: 1 - DNA, 758 bp, Macropus eugenii
  misc_feature (638)..(638): n is a, c, g, or t
ctgtggcctgaccactgtgctcaccctcactggagtctccaggctggatcaggctcaggcctacttggctgcaggccagcttgatctggtaccccactactatgtggacagtattgcagacttgatagcaggcttagaggactgaggccacctgaccagctgccgggcagccaagagaacaggctgtcattctcatttcttctcccctggtctcttttacattgtagtcatgagagtaccccttccctaatccccatatcctagtccattttggatatttcccttctccaaccccaccacagtgcacacgtgcgcgcgcacacacacacacgcactttgattctccatcttctgggatcagtaggtcaggacctgcctcccacctccccaagggacctagttatctcttctccctttagtttggactaggcctcttctttgcccattatctcctgtttccctctattgggtgccatttccctaatggcagcattccctcccccttacccctctgctcagcccccacttcctccttctctcagctctgacttggtcgatgctgccttaacttctttctcccaacttctcttttctagacccaggagctatgactctgagggcacagggtgcctcagttnccttttctgtaaaatgagggtgttagactaaatgacctctgagccccctttcagttctgaatctatgatcctaagggggcccttcttggaactctctgtgccattaatttccgcaacccc

SEQ ID NO: 2 - protein, 47 aa, Macropus eugenii
CGLTTVLTLTGVSRLDQAQAYLAAGQLDLVPHYYVDSIADLIAGLED

SEQ ID NO: 3 - DNA, 723 bp, Macropus eugenii
cagcacccgatgcccgcttagccttcgaccttccaggaaaagaccatgtaacaatcaaccctgtactcagcacccagatgaccattgccaggacaactccccacactgccccctcgtggtccaggctcgcctctgcgtctacccctactacacagccacctgctgccgttcctgtgcccatgtccaggacagggcacccccagaacctgcctgagatgggactgaagtgacatttacagttatcttccctgccccagcatcagctgccccatggactctatccccttcctgcccttgacctgcctcatgggacactcagagaaataccagcaccttctatatttatcctgggaggagtctggggaacgcagtgtgacaggttgtggggagatagctgtgacagtgtgtgaggttgtgttcatgtacctgtgtgattgtatgtatatatgtcattatacatgtctgtccctgggtgctattgctggtgggactgtgtgacttcctgctaactagggtccctggccaagacagactgggatatatgaaatgccctgatgcgcctccccttgccccacctcttgcaactgagtgaaaccaagacaaaagttcattctggtcctttgattttgccctgaccagccctgttgcctaaatcaaactaaccatggtatatttttgcatgtcctgaacacaccttcaggcttgcacctttgaccccagcct

SEQ ID NO: 4 - protein, 70 aa, Macropus eugenii
  misc_feature (30)..(30): Xaa can be any naturally occurring amino acid
APDARLAFDLPGKDHVTINPVLSTQMTIAXDNSPHCPLVVQARLCVYPYYTATCCRSCAHVQDRAPPEPA

SEQ ID NO: 5 - DNA, 650 bp, Macropus eugenii
actgccctggtgtgtgataatggctcagggctctgtaaggctggttttgctggggacgatgcccccagagccgtcttcccttccatcgtgggccgtccccgacatcagggagtgatggtgggcatgggccaaaaggacagctatgtaggggatgaagcacaaagcaaaagaggaatcttgaccttgaaatatccgatagaacacgggatcatcacaaactgggatgacatggagaagatatggcaccactccttctacaatgagctgcgtgtggccccagaagagcatcctactctgctcactgaggcccccctgaaccccaaagccaaccgagagaaaatgactcagattatgtttgagactttcaacgtgccagccatgtatgttgccatccaagctgtcctgtccctctatgcctctggacgtacaactggtatcgtgctggactctggggacggcgtcacccacaacgtacccatctacgagggttacgctctgccccacgccatcatgcgtctggatctggctggccgagatctcactgactacctcatgaagatcctgactgagcggggctactcctttgtgactaccgctgagcgggaaattgtgcgtgacatcaaggagaagctttgttatgtggctctgga

SEQ ID NO: 6 - protein, 224 aa, Macropus eugenii
  misc_feature (224)..(224): Xaa can be any naturally occurring amino acid
MCEEEDSTALVCDNGSGLCKAGFAGDDAPRAVFPSIVGRPRHQGVMVGMGQKDSYVGDEAQSKRGILTLKYPIEHGIITNWDDMEKIWHHSFYNELRVAPEEHPTLLTEAPLNPKANREKMTQIMFETFNVPAMYVAIQAVLSLYASGRTTGIVLDSGDGVTHNVPIYEGYALPHAIMRLDLAGRDLTDYLMKILTERGYSFVTTAEREIVRDIKEKLCYVALX

SEQ ID NO: 7 - DNA, 743 bp, Macropus eugenii
catacatcttctccccagactgtgccctggaaccgtccccagccatcagaagagagacagccttcctgtcaggggattgtggaagccaagttttccagttcctcgtcctctaaccattcagacaactttttccgaacaggaagcagtcccctggaagttcccaaaaccaggtttactgcaccaactgaacgggaatccaggctggaagaagtccgttcaacctttctggctacgtacagcagcacagtgggacttaaatcagtgacacccagcccctcgggggccattgggggcctcctggagcagtttgcacggggagtaggactcagagtatccagcagcactctgtgaaccattataggctcatacaatctccaattccacctcatccccctactcagctgagccattggaggaatcaaagccatgagagccctgaagcagtgggatttgcccccagatcctttcttagaggagtctcttgcctccatttggcagcccataggaatgtgcccaagctgtgagctatctctgcaaaactgtaaacttcagactgtgaccattaccttctatttccttttttggtcttccttagccctgtctgccaagctgacctgcccccattcccacccccaacacacacttggttttgttcagtgtcagcctggctgatccttcaccaccaaaaactgcagtgttttgtgaatcctgtagagacagcatttttgggggagtcccttgtt

SEQ ID NO: 8 - protein, 174 aa, Macropus eugenii
  misc_feature (104)..(104): Xaa can be any naturally occurring amino acid
  misc_feature (164)..(164): Xaa can be any naturally occurring amino acid
HTSSPQTVPWNRPQPSEERQPSCQGIVEAKFSSSSSSNHSDNFFRTGSSPLEVPKTRFTAPTERESRLEEVRSTFLATYSSTVGLKSVTPSPSGAIGGLLEQFXTGSRTQSIQQHSVNHYRLIQSPIPPHPPTQLAIGGIKAMRALKQWDLPPDPFLEESLASXLAAHRNVPKL

SEQ ID NO: 9 - DNA, 757 bp, Macropus eugenii
gccttcaaatattttgttcaaggcatgggctacatggcatcttcctgtatgacccgtttatcccgatcccgaactgcctccttgaccagtagagcttcgattgatagcggccgttctcgaaccacctctcagagcagcgagtctgggattgttccttcagggtctccaggacaaacgatggaggtctcttcttgagcatccctccttccccttttgaaggacctggccctcaccacccccagccccccaactctaacccgggggccgggagggtatataagggtgataggctggatagagaacaagagaggtgggacagaatctgcagggagatgactttgaccttttgatttctaccctaaccttgacctctaacttgccccccaaaccctgggagagagatcccaatgtctcttagggacccagacccttgacttttcattcctggattgtctccttattttggaggaagacttgaaggggacatgctagtccttgatccaggaaccttcagatgagggaggaggggttgctgcatcccagctcagactctttttttctatctcaggatgctctgtactatgggcattcagggaacccactggggatggagttgctaatgctatccgattaatctttattcccttatggggatgggtgcgcgagtgacagtatgagtgtttagaagcttattgggtattcaggttcagtggaggccctatgattgccatggacaggttcagaggaagataaataa

SEQ ID NO: 10 - protein, 67 aa, Macropus eugenii
  misc_feature (24)..(24): Xaa can be any naturally occurring amino acid
  misc_feature (56)..(56): Xaa can be any naturally occurring amino acid
MLKKRPPSFVLETLKEQSQTRCSXEVVRERPLSIEALLVKEAVRDRDKRVIQEDAXVAHALNKIFEG

SEQ ID NO: 11 - DNA, 757 bp, Macropus eugenii
  misc_feature (702)..(702): n is a, c, g, or t
  misc_feature (712)..(713): n is a, c, g, or t
  misc_feature (715)..(716): n is a, c, g, or t
  misc_feature (726)..(727): n is a, c, g, or t
tgctcttcaaaacattatcctttatcacctgacaccaggagttttcattggaaaaggatttgaacctggagtcaccaacattcttaagacaacacaaggaagcaaaatcttcctgaaaggtgtaaataatacacttctggtgaatgaagtaaagtcaaaagaatctgatgtcatgacaactaatggtgtcattcatgttgtagacaaactactctaccctgcagacatacctgttggaaatgatcagctgctggagattctcaataagttgattaaatacattcaaattaagtttgtgcgtggcagtaccttcaaagaaattcctgtcactgtttacacaactaaaattattacaaaagttgtggaacccaaaattaaagtgattgaaagcagtcttcagcctattgtcaaaagtgaaggaccttcaatgacaattgaaggtgattctgaattccaagtgattaaggagggtgaaacaataactcaagtgattcatggagagccaattattaaaaagtataccaaaattattggtgggagaccagtagaaataactgaaaaagagacaacagaggaaagaattattaaaggtcctgaaataaaatataccaggatttcttctggtaatgttgcagagacagaagaaacgctaaagaagttgcttgaggaagaccgaccaatcaagaaagtaccagcccacanaaggacacanngnnacagaagaanngtcagagaagggcgttctcagtgatactcc

SEQ ID NO: 12 - protein, 253 aa, Macropus eugenii
  misc_feature (234)..(234): Xaa can be any naturally occurring amino acid
  misc_feature (237)..(239): Xaa can be any naturally occurring amino acid
  misc_feature (242)..(242): Xaa can be any naturally occurring amino acid
  misc_feature (250)..(250): Xaa can be any naturally occurring amino acid
  misc_feature (253)..(253): Xaa can be any naturally occurring amino acid
ALQNIILYHLTPGVFIGKGFEPGVTNILKTTQGSKIFLKGVNNTLLVNEVKSKESDVMTTNGVIHVVDKLLYPADIPVGNDQLLEILNKLIKYIQIKFVRGSTFKEIPVTVYTTKIITKVVEPKIKVIESSLQPIVKSEGPSMTIEGDSEFQVIKEGETITQVIHGEPIIKKYTKIIGGRPVEITEKETTEERIIKGPEIKYTRISSGNVAETEETLKKLLEEDRPIKKVPAHXRTXXXRRXVREGRSQXYSX

SEQ ID NO: 13 - DNA, 770 bp, Macropus eugenii
  misc_feature (639)..(639): n is a, c, g, or t
ggtaggaggtcctttgtccaggctcctcatccattgcctctttctgtctcagtggaccataccaaattctaccaaccattccatttttgtttctgttcaagtgctgcctgcttcctgcatctcctcccctgagtgcttcctcaccctcctctctaccccccccaaggctctgtgaagttggacaggcattcccaactgttcaggtcctcctgtgtgcagggtgcctaggatgaaacaggggttttcattcacctgggctgggctacagccctcaggggagatatctatctcagtaagctggctatttttagtttgctgcatcctctggaaaggcatgtgctgcaggggaaagatggtgggacttggtgtcagcatactccctggtgtgtcagcctcaggctgtccatctgtgaaatggggatagtaatggcaagccctcggccccatatgccagacaagcagagctgctaccttcttttcttttacccttggggtctgggctgctgagggagcacccagacctatctttcttcctccctcctacctgccttctcccagttagagcagcagctgcagcagcggacctcagagcagctagagatgcaggtacagaatgcccagctctggctggcgaatgangagcttcggacgcagctggagcagagcccagcccagctggaggtgactcgggagcagctgctgaggctgcaggctgaggctcaagctgagaaagagcaaagcacaggtcctgcagcagggggttgccactc

SEQ ID NO: 14 - protein, 75 aa, Macropus eugenii
  misc_feature (31)..(31): Xaa can be any naturally occurring amino acid
AFSQLEQQLQQRTSEQLEMQVQNAQLWLANXELRTQLEQSPAQLEVTREQLLRLQAEAQAEKEQSTGPAAGGCHS

SEQ ID NO: 15 - DNA, 755 bp, Macropus eugenii
  misc_feature (731)..(731): n is a, c, g, or t
  misc_feature (733)..(733): n is a, c, g, or t
ggcgcgagcagctggggccgccatggagccggggcggcgggaggaggaggaggaggaggaggaggagcagggggaggaggagaaggaggatcagccgcagctcgccttgatccagaacctgaaggcgagcctccactacacagtgggttccatgtgccaagaagctgctgatgccaagggcgtcaggttcaccaagtcgaccatcgcagccatatcagaggtcacctttcggcaatgtgaacattttgccagagaccttgagctgtttgccagacatgccaaaagaagcacaattaacatggaggacgtgaagctcttagccaggaggagtagctcattgctaaattacatcacagagaagagtgaagagatttctcgagttaaccaggaacaaaaggataagaagaaaaagaaggcagaaggaggaagcaaaaaatccagtaaacaggcagtaaccaaaatggacattgacgattgagatgggctcctgtcactgccggacacttcctgctcccgctgttctgggtgatgttggggccaatgagtgagccatgcagcaattaccatcccaccagcttgactcttggaagccaacttggaagaatgagtggagagaaaactggcggaccatttggggctagtctggctcctactcccatagttgtatataattttaccacataagaagctggaatactaagcaagatatacagtgcctttattgaacacananaaagagtgttggacactgtgat

SEQ ID NO: 16 - protein, 174 aa, Macropus eugenii
MEPGRREEEEEEEEEQGEEEKEDQPQLALIQNLKASLHYTVGSMCQEAADAKGVRFTKSTIAAISEVTFRQCEHFARDLELFARHAKRSTINMEDVKLLARRSSSLLNYITEKSEEISRVNQEQKDKKKKKAEGGSKKSSKQAVTKMDIDIEMGSCHCRTLPAPAVLGDVGANE

SEQ ID NO: 17 - DNA, 776 bp, Macropus eugenii
  misc_feature (600)..(600): n is a, c, g, or t
  misc_feature (608)..(608): n is a, c, g, or t
  misc_feature (650)..(651): n is a, c, g, or t
  misc_feature (662)..(662): n is a, c, g, or t
  misc_feature (734)..(734): n is a, c, g, or t
gaaccactgaactacaagatgagctaagtcatctgcgcagtcagattgccaagattgtggcagcagatgcagcctcggcttcgttgacaccagatctcttctcttcaggaagttcgaatgtctcttctcccttaccttgttttggatcttcattccactctacaacttcctttgtcattagtgacatcacagaggaggccgagttagaaggccctgagcttccatcggttcccatgctttgttctgccagctctgaatgttgtaaaaccgactccaaagctgcctgcagcctggttgaagacgacgactgtgtgtctctctcaaaggctagcagttttgcagacatgatgggcatcctgaaggacattcaccggatgaagcaaagccaggacctgaatcggagcttgatgaaggaagaagacccagctgtcctcatttcagaggtgctgaggagaaagtttgctctgaaggaagaggatatcagcgtgaaaggaaactgatgacccctttctggcaccctatatatggctctttctttataagctgtctcacaacagataacttctgccttgcagttagaaatgtccttccacaatgganaacacttncaggctaggaatggggagaagagagaaaagctgaactgcttnncccatactcanacctttagcagaacttttaagacagcgttctaaggtagttttgagttgcgggtttgcagggtatcaggcatngtgtttacatagaagaccagatgggagttttggtttcctctt

SEQ ID NO: 18 - protein, 165 aa, Macropus eugenii
TTELQDELSHLRSQIAKIVAADAASASLTPDLFSSGSSNVSSPLPCFGSSFHSTTSFVISDITEEAELEGPELPSVPMLCSASSECCKTDSKAACSLVEDDDCVSLSKASSFADMMGILKDIHRMKQSQDLNRSLMKEEDPAVLISEVLRRKFALKEEDISVKGN

SEQ ID NO: 19 - DNA, 732 bp, Macropus eugenii
  misc_feature (581)..(581): n is a, c, g, or t
gcaagatggcggtgcagatctccaagaagaggaagtttgttgctgatggcatctttaaagccgagttgaatgagtttctcaccagggagctggctgaggatggctattctggagtggaagttcgagttaccccaactaggacagaaatcatcatcttggccaccaggactcagaatgttcttggggagaagggtcgccggattcgggaactgactgctgtagttcagaagaggtttggcttcccggaaggcagtgtagagctgtatgccgagaaggtggccaccagaggtctctgtgctattgcccaggccgagtccctgcgctacaaactcctgggaggtcttgctgtgcgtagggcctgctatggtgtcctccgcttcattatggagagtggagcaaaaggatgtgaggtggtggtgtctggtaagctcagaggccagagggccaagtccatgaagtttgtggatggtctgatgatccacagtggagaccctgtcaactactatgtcgacacagctgtgcgccacgtcctcctcagacagggtgtattgggaattaaagtcaaaatcatgttgccctgngacccaagtggcaagattggccctaagaagcccctgcctgaccatgtgagcatcgtagagcccaaagatgagattcttcctaccacccccatctcagagcagaagagtgggaaggcagagcaaccagctatgccccagccagtgcccactg

SEQ ID NO: 20 - protein, 243 aa, Macropus eugenii
  misc_feature (192)..(192): Xaa can be any naturally occurring amino acid
  misc_feature (243)..(243): Xaa can be any naturally occurring amino acid
MAVQISKKRKFVADGIFKAELNEFLTRELAEDGYSGVEVRVTPTRTEIIILATRTQNVLGEKGRRIRELTAVVQKRFGFPEGSVELYAEKVATRGLCAIAQAESLRYKLLGGLAVRRACYGVLRFIMESGAKGCEVVVSGKLRGQRAKSMKFVDGLMIHSGDPVNYYVDTAVRHVLLRQGVLGIKVKIMLPXDPSGKIGPKKPLPDHVSIVEPKDEILPTTPISEQKSGKAEQPAMPQPVPTX

SEQ ID NO: 21 - DNA, 746 bp, Macropus eugenii
  misc_feature (642)..(642): n is a, c, g, or t
  misc_feature (652)..(652): n is a, c, g, or t
  misc_feature (690)..(690): n is a, c, g, or t
  misc_feature (722)..(722): n is a, c, g, or t
  misc_feature (731)..(732): n is a, c, g, or t
cacagaagtagctttcctgatgatgcctttgtaacgatacttttaagacagtttccatttagaataagaacttaaactgtagtatgaatggaaaatgctgtgggctgggccccacgaccaaaaactgattgagttattttagtttggtctgtgattttgctgtttggaaacgagcagtggggaatctgactatgtccatgtagatcttaccttatagttagtcctagggagttgtctgaaaccctgagaggctagctgacttaatctgcattacatagctagtgtgtatgtgtgtcaggctacatttgaactcaggtcttcttgactttgaaaccatctttattacactagactgccttccttaatttttcttcatttcttttacatttgcagaatgacacagtaaccatcagaaccaggaagttcatgacaaacagacttcttcagcgtaaacagatggttatagatgttcttcatcctggaaaggccacagtgcccaagactgaaattcgagaaaaactagcaaagatgtacaagacaactccagacgtcatttttgtctttggattcagaacccattttggtggtggcaaaacaacaggctttggcatgatttatgattctcttgactatgcaaagaanaatgaaccanagcacagacttgcaaggcatggcttgtatgagaagaanaagacatcaagaaagcagcgaaaggaacgcangaacagaanntgagaagtcagggg

SEQ ID NO: 22 - protein, 107 aa, Macropus eugenii
  misc_feature (72)..(72): Xaa can be any naturally occurring amino acid
  misc_feature (76)..(76): Xaa can be any naturally occurring amino acid
  misc_feature (88)..(88): Xaa can be any naturally occurring amino acid
  misc_feature (99)..(99): Xaa can be any naturally occurring amino acid
  misc_feature (102)..(102): Xaa can be any naturally occurring amino acid
  misc_feature (107)..(107): Xaa can be any naturally occurring amino acid
MTNRLLQRKQMVIDVLHPGKATVPKTEIREKLAKMYKTTPDVIFVFGFRTHFGGGKTTGFGMIYDSLDYAKXNEPXHRLARHGLYEKXKTSRKQRKERXKEXEKSGX

SEQ ID NO: 23 - DNA, 733 bp, Macropus eugenii
cccaaccagacatgcaacctgcaagacccctgtaaggatcacaatgatcagccagaggtgccaccccaccctgcttgctgggtcaagcactgctgtttccagaatcagcttgagttgatactctgattcaagtctgctctggtgccactagccaagtccggagtgtgagtcctgctctttggcacatgcaccatgagtcacagtaccagctccaggctggctgactctccacagctctccaagagcagcctcttgaacatcctgggcagcccttcacctgagcggatgggcctagctgactctctgccccccaccccacagagcagtaccccttctccaggacccccaccactgcctctgttgcctggtgggtccccagggttggatggtgactgggagagccgagaagagctgcgtcttcgagaactggaggaggcccgggcccgggcagcccagatggagaagaccatgcgctggtggtcagattgcacagccaattggagggagaagtggagtaaggtgagagctgaacgcaacaaggcacgggaagaggtgcgccaacttcggcagaagctggaggcgttgactaaagagctgacgggtgcccggcgggatcggcaagaggccctgaaccagagtgaacagctgagcaaggaggtggctcgacttaagggggcccggctgcaggaggaggaagagggggagaaccgtcaggagggagaggaggctcatg

SEQ ID NO: 24 - protein, 181 aa, Macropus eugenii
  misc_feature (181)..(181): Xaa can be any naturally occurring amino acid
MSHSTSSRLADSPQLSKSSLLNILGSPSPERMGLADSLPPTPQSSTPSPGPPPLPLLPGGSPGLDGDWESREELRLRELEEARARAAQMEKTMRWWSDCTANWREKWSKVRAERNKAREEVRQLRQKLEALTKELTGARRDRQEALNQSEQLSKEVARLKGARLQEEEEGENRQEGEEAHX

SEQ ID NO: 25 - DNA, 724 bp, Macropus eugenii
aaaggacaaaatcacagcattcattgttgaaagagattttggtggcattacaaatggtaaacctgagaacaaattaggcatccggccctctgacacttgcgaagttcattttgaaaatacaaaagtgcctgttgaaaatgtcattggagaagttggaggtggatttaagctagcaatgaatatcctcaacagtgggcgatttaccatgggaagcttagttgctgggatgctcaagaagttgattggactgacagcacaatatgcgtgtacaaggaagcagttcaacagacctctaaccgaattcgcactaattgaggaaaagctcgctctgttggtcaagaaagcatatgcgatggagagtatggcctacctcacctgccgggatgatggacagcccaggcttccctgattgctctctggacgcaccgatggcgaacgcgctcagatccgaaccaccctcgcatttgagtaagcgaagccctacagattgctggacgcctggcactcatgaaacactaccccctatgagccctaccctcgccaccgccgcaccctgctgattttcgcgggaatcactgagatcctcccgcccgccactcgccctgacagccactgtataccccacgcccactcctcaccaaacacacaccaaccacctcctcgaagcgccaccgcgagcgcctgcctgcgaccatgcaccaccgccaccccccacaaagtttgt

SEQ ID NO: 26 - protein, 156 aa, Macropus eugenii
KDKITAFIVERDFGGITNGKPENKLGIRPSDTCEVHFENTKVPVENVIGEVGGGFKLAMNILNSGRFTMGSLVAGMLKKLIGLTAQYAVYKEAVQQTSNRIRTIEEKLALLVKKAYAMESMAYLTCRDDGTAQASLIALWTHRWERAQIRTTLAFE

SEQ ID NO: 27 - DNA, 710 bp, Macropus eugenii
cacatcatggcggcggcggcggcggcagctagaggagctgctcccaccacccagccgccgccgccggggccccgctgaggagccgggaggacgggagcgggccccgccggccccggagccggcgtcggcgcgatgctgttctcgctgcgggagctggtgcagtggctgggcttcgccaccttcgagatcttcgtgcacgtgctggcgttgctcgtgttctccgtgctcctggcgctgcgcgtggatgagctggccccgggcctgtcgtggtggaacgtgttcgtgcccttcttcgccgcggacgggctcagcacctacttcaccaccatcgtgtcggtgcgcctcttccaggacggggagaagcggctggccgtgctgcgcctcttctggatcctcaccatcctcagcctcaagtttgtgtttgagatgctgctgtgccagaagctggtggagcagacgagggagctctgctttggccttatcatgtccccggtcttcatccttctgcagctgctcatgatccgggcttgtcgcgccaactagcgctgctgggaggggagggagaaaggacgcgctgcgagccccagccctcccgagccggcggccggatcgcgtgagccccgcccaggtgcaaggagtctcactcgcttgtgaagctctcagcttctctcgcgcctttacccctattactggaggcggccctatcgtcc

SEQ ID NO: 28 - protein, 136 aa, Macropus eugenii
MLFSLRELVQWLGFATFEIFVHVLALLVFSVLLALRVDELAPGLSWWNVFVPFFAADGLSTYFTTIVSVRLFQDGEKRLAVLRLFWILTILSLKFVFEMLLCQKLVEQTRELCFGLIMSPVFILLQLLMIRACRAN

SEQ ID NO: 29 - DNA, 697 bp, Macropus eugenii
ggcatctgtacttccacgggcatcattcgggattttgcaggcccctactatgtctcggaagacaatatggcctttgggaagcctgtgaagtactggaagttggacccttccaaagtgcatgccagccgaccaaatgcctgggacactgcagtccatgaggcatcagaggaatataaacatcgcatgcacaatctgtgctgtgataattgccactcccatgtggccctggccctgaatctgatgcgctacaacaacagctctcactggaacatggtgaaggtcggccttttctccctgatctatgggaagtatgtcagcttcggggcatttgtgaagacctggcttccctttgttcttcttttgggcattatcgtcactgctgcctttgtcttcaatctgcggtgatggccgccccctcagcctggcaggcctcggctggcaggagcctgggcctgacatacacacacacacactccctgccccgccctcccagagctggctgctaggcctagactcctacctcctgtggttgcacataccactccctccctgaagtactggagccaggctgtaagaatagcagccgcaactcaagagactgagatgatgaccctgcaaggggccagttacccctaattctgttttagccaagctggggcccttcctcatctgcccacttcccaggatggagcagctg

SEQ ID NO: 30 - protein, 134 aa, Macropus eugenii
GICTSTGIIRDFAGPYYVSEDNMAFGKPVKYWKLDPSKVHASRPNAWDTAVHEASEEYKHRMHNLCCDNCHSHVALALNLMRYNNSSHWNMVKVGLFSLIYGKYVSFGAFVKTWLPFVLLLGIIVTAAFVFNLR

SEQ ID NO: 31 - DNA, 716 bp, Macropus eugenii
gaaaaccaaactgattcccactctgaacaaagtgccaaacctgacagactgccatatttactaccagctcttccagctgcagaaactttgctgtcctacagccattaatggtccctcttgtattctccaggtggcccagagtagtgacagagacccctccccagtctgctctaggttgtgactggtcctgaggcttgtgaccagagatgggcctgagccagaaaccagactcccagacctgggcatattcggtgcctcctttgcctagttctcaagcccatgttccacccctggcatatctagtagagaaagaaataaagcaaggatcagtgtcaggattggtcaggttccaaggaatggggggagagcgggtccagttaatgtcatttaattcactcccagatgaccaagcacaaggggctaaagatgaaagcaagaaggcataggcggctagggggcacagggtacccattggccagccatggcaaggcaaagcataaacagtgtaatctgtggctgaacggctagggaaacaagggagtctgggggagggccacgcccgctcattcccattcttcaccacccgttgaagatggccctctccccccctgccgccagaccctctcctcgccaaacaccgccacccaaccccccgccacgctacctcccacacctcgcccctcacacattgtttgcaccgcaacccctagcttgat

SEQ ID NO: 32 - protein, 147 aa, Macropus eugenii
  misc_feature (66)..(66): Xaa can be any naturally occurring amino acid
KTKLIPTLNKVPNLTDCHIYYQLFQLQKLCCPTAINGPSCILQVAQRVTETPPQSAQVVTGPEACXPEMGLSQKPDSQTWAYSVPPLPSSQAHVPPLAYLVEKEIKQGSVSGLVRFQGMGGERVQLMSFNSLPDDQAQGAKDESKKA

SEQ ID NO: 33 - DNA, 736 bp, Macropus eugenii
gcaaacctacaccccaacctacaatcagggagggtacacccagccagcttacactgcacctccaccgccaccgccaccaccccctcccacctacaactatgccagctacacggcctacaccccgccctataccaccccaccaccacctcctacaggacagacctacagtcagcagaactacaaccagtatcagcagtacgcgcagcaatggaaccagtactaccagggccagtggccaccatactacggcaactatgactacgggagctattcggggagcacacaggggggctcaagtacgcagtagctgaggcttccccaaggcagagaccacaccctccggcctgggccagagggcagttgccgccttgcccagctgtgtccgtccgtccatccgtctgtctgtctgtccatccgtctgtcctcagctcctgcctttcttgcccatcctcccattgagaaggcgcttgattcctccatcctctcccactctttttccagttccacaatgcagtgaaaaaagaaagaagcccctttgctttttattcttttttttctttttgaaacaccggtcctatgctgcctgcccctgctccttcccctccagtggggaaaacactcagcagctccaggggccggaggagagcccagggtggccgtggttgctgcccttgatttctcctcctccctctcagcttgccaggccttctagaaagcagcccctgctggagatgtt

SEQ ID NO: 34 - protein, 103 aa, Macropus eugenii
  misc_feature (88)..(88): Xaa can be any naturally occurring amino acid
  misc_feature (101)..(101): Xaa can be any naturally occurring amino acid
QTYTPTYNQGGYTQPAYTAPPPPPPPPPPTYNYASYTAYTPPYTTPPPPPTGQTYSQQNYNQYQQYAQQWNQYYQGQWPPYYGNYDYXELFGEHTGGLKYXSS

SEQ ID NO: 35 - DNA, 723 bp, Macropus eugenii
  misc_feature (700)..(700): n is a, c, g, or t
aggtaaaaagagtcaagactgtatcccagtactgaaggagatggcaggtgtggaacaggccctgggaaattacagctcagcaattgaccatcttgtgcaggcacatcatatcacccagaatcaaaatccttccgtagaagaagcagcagactcagcactctcaattgcccatgctgccattgcctcttcaagacctgagcacaatgatgtggcagagcaatatttccaagagagtatgactatccttaagaaagccagaggaacagccaatgacaaattttttgcaattcaagatgaattttgccgttttcttcggactactggtaagctaaagagagcagctcaaatactgaaggaatcactagatactaaagttgcaacatttggggatgtcagtcctgaagtggcagggacttactttttccttggagaagcagacctggcacatggagaccagaacatggcatacaggaaatttaagaagtgtcttcagattcagactctcttgcatggatctcaagataaaaggacaacagccaccccacagactcttgactcattatgaaagattccagagggcacagcaagacagaaacaatgtaacaaagcaagaccaccattttgcgctgttgttccacaacacacaacattaggagggactaacaaaatatatcggataatatcccctaccttccccaangtgcacgattctgacataaaccg

SEQ ID NO: 36 - protein, 241 aa, Macropus eugenii
  misc_feature (233)..(233): Xaa can be any naturally occurring amino acid
GKKSQDCIPVLKEMAGVEQALGNYSSAIDHLVQAHHITQNQNPSVEEAADSALSIAHAAIASSRPEHNDVAEQYFQESMTILKKARGTANDKFFAIQDEFCRFLRTTGKLKRAAQILKESLDTKVATFGDVSPEVAGTYFFLGEADLAHGDQNMAYRKFKKCLQIQTLLHGSQEKGQQPPHRLLTHYERFQRAQQDRNNVTKQDHHFAAVVPQHTTLGGTNKIYRIISPTFPXVHDSDINR

SEQ ID NO: 37 - DNA, 721 bp, Macropus eugenii
  misc_feature (630)..(630): n is a, c, g, or t
ggaacttattcagcccagggagccaagttccagatacatctctctttgtcatgaactgcatactcttttccaagttatgtggtctggaaaatgggcattggtgtccccatttgccatgttacactcagtgtggaggctaataccagcatttcgtggttatgcccagcaggatgctcaggaattcctctgtgaacttttggataaagtacagcatgaactagagactacgggtaccaggtatccagctctcatccccagttctcaaaagaaacttatcaaacaggttttgaatgtggtgaataccatctttcatggacaacttcttagtcaggttacatgtcttgcatgtgataacaaatcaaatacagtcgaacctttctgggacctgtcactggaatttccagaaagataccactgtaatggaaaagaaatggctgcccagcatccctgcttggttacagaaatgttggccaagttcacagaaactgaagctttagaaggaaaaatttatgtgtgtgaccagtgtaacacaaagcgcaggaaattttcttcaaaaccagttatactcacagaggcccagaaacagcttatggtgtgtcggctgcctcaggttctgagactacaccttanacgattcagatggtcagggcgaaatcacagagcagaaataggagtccacgttggttttgatgaaattctgaacatgcaaccctattgctac

SEQ ID NO: 38 - protein, 240 aa, Macropus eugenii
  misc_feature (210)..(210): Xaa can be any naturally occurring amino acid
ELIQPREPSSRYISLCHELHTLFQVMWSGKWALVSPFAMLHSVWRLIPAFRGYAQQDAQEFLCELLDKVQHELETTGTRYPALIPSSQKKLIKQVLNVVNTIFHGQLLSQVTCLACDNKSNTVEPFWDLSLEFPERYHCNGKEMAAQHPCLVTEMLAKFTETEALEGKIYVCDQCNTKRRKFSSKPVILTEAQKQLMVCRLPQVLRLHLXRFRWSGRNHRAEIGVHVGFDEILNMQPYCY

SEQ ID NO: 39 - DNA, 693 bp, Macropus eugenii
  misc_feature (686)..(686): n is a, c, g, or t
gcacctgcatcctgcccaacatcgaggcggtcagcaacgtgcacaacctcaactcggtcaaggagtccccgcacgagcgcatgcaccggcacatcgagctggcctgggctttctccacggtcatcggcaccctgctcttcctggctgaggtggtcctgctctgctgggtcaagttcctgccgctcaagaagcagcccgagccccagcccaccaagtcccctcccccggcatcgtcctccaataccagcttcaccccgggccaggaggcagccatcgcctccaccaccatcatggtccccttcggcctggtcttcatcgtcttcgcggtccacttttaccgctccctggtcagccacaagaccgacaggcagttccaggagctgaacgagctggccgagtttgcccggctgcaggaccagctggaccacagaggggatcacgctctgacccccggcagccacttcgcataatgccccttctccaacccggtgtccagagctggggggccgggagggaggatggtctgagccccacgaggtgcagaaaggaaacctgtcctgccttaatattctaattgacctctctctctgatgcacgaacctggaagatggtggatcgggacttgttgggggagaggagcaggtttgttgtttttaagccttgacttaaaatatttgtctcacccncccttct

SEQ ID NO: 40 - protein, 155 aa, Macropus eugenii
TCILPNIEAVSNVHNLNSVKESPHERMHRHIELAWAFSTVIGTLLFLAEVVLLCWVKFLPLKKQPEPQPTKSPPPASSSNTSFTPGQEAAIASTTIMVPFGLVFIVFAVHFYRSLVSHKTDRQFQELNELAEFARLQDQLDHRGDHALTPGSHFA

SEQ ID NO: 41 - DNA, 726 bp, Macropus eugenii
cggactcgttttctttgtatcctcagttcatgttccatcttcgaagatccccatttcttcaagtgtttaataacagtccagatgaatcatcttattaccgacatcattttgccagacaagacctgacccagtctctcatcatgatccagcctattctttattcttattctttccatggtccacctgagccagtacttttagatagcagcagcattttggctgacagaattctactgatggatacctttttccaaattgtcatctatcttggtgagaccatagcccagtggcgtaaagctggctatcaagacatgcctgaatatgaaaatttcaagcatcttctgcaagctccattagatgatgcccaggatatcctgcaaactcgattcccaatgccaagatacatcaacactgaacacggaggtagtcaggctcggttcctcttgtccaaagtgaatccatctcagacacacaataatttgtatgcttggggacaggaatctggagctccaatattaacagatgatgttagtctgcaggtgttcatggatcatttgaaaaagttggcagtatcaagtgcctcctaaattgagaaagtagcagtgatgtttagaaagaagacaataactagactatgttcatagctactcaaaatatttactacattccttttactttattgcaagattttaaaatgtcatcatgtactccatacattcaaaagcg

SEQ ID NO: 42 - protein, 194 aa, Macropus eugenii
DSFSLYPQFMFHLRRSPFLQVFNNSPDESSYYRHHFARQDLTQSLIMIQPILYSYSFHGPPEPVLLDSSSILADRILLMDTFFQIVIYLGETIAQWRKAGYQDMPEYENFKHLLQAPLDDAQDILQTRFPMPRYINTEHGGSQARFLLSKVNPSQTHNNLYAWGQESGAPILTDDVSLQVFMDHLKKLAVSSAS

SEQ ID NO: 43 - DNA, 718 bp, Macropus eugenii
ccagttctcagtgccttgggtattactgaagccaggtttccaagatttgcagccagattggtctttgaactgtggcaagatggggaaagacctgctgatcattttatccgtattctttataatggagttgatgttacattccacacctctttttgccaggaacaccacaagcattccagcaagcctatgtgtcctcttgaagattttgttcactttgtcaaaagggacatgttttcagtcttaaatagtagtagttattatgatgcatgtcatagaaaaacattttaaaagaaaatcattctgtatttgtgaaatttgtgctggtacagaagatgaccacttgagattctttctgattcaaaagggtacgacagtattgctttgaaaatacttagaaatccttgcttgggaccatataggttgagtgacttgaatagcaaataatttactatgatttggtacatgatttagttcattaatttggtgcagttctacttcattcagaaacagaagtactctgctgtaaattgatattgcttggaataaatgattttcctccttatgccagaatagataagtttaggttgccaattgagaatttcattctcttgactgccatggtactataatatgtaaccaacaaacctcatccacaatgtttcttaatcttgtgcagttatagttactccttaaatgaaattattcctaaattggatgt

SEQ ID NO: 44 - protein, 77 aa, Macropus eugenii
  misc_feature (4)..(4): Xaa can be any naturally occurring amino acid
MSLXDKVNKIFKRTHRLAGMLVVFLAKRGVECNINSIIKNTDKMISRSFPILPQFKDQSGCKSWKPGFSNTQGTENW

SEQ ID NO: 45 - DNA, 731 bp, Macropus eugenii
gcatctcattcgggatataattaaccagcgttgtgggagcaacccattgattggaaggccaaataaggtgacaacagtggacagattccaaggtcagcagaacgactatattcttctttctctagtacgaactagagcagtgggccacctgagagatgttcgtcgtttagtggtggccatgtcaagagccagacttggactttatatctttgcaagagtgtccctcttccagaactgcttcgaactaactccagcttttaaccaactcacagcccgcccacttcatttacagataattcccacagagcatttccctactaccagaaagaatggagagaacccatctcaccctgtgcagataataaaaaatatgcctcagatggcgaactttgtgtacaacatgtacatgcttatgatccagagcacgcatcattataatcaggctctgctacctccacctgccatggtagaagaaagtgatacagttcagaatcaggaagcagaaatggaagttgaagtagaacctagccatccaccatcagagactaccccaaccacagctgaggctgttctcacaatggcagaggctgctcccaccacggtcacccctgcagcgtcagagggcacagagacagattccacacctgctccagcagagacagaagtcacacccatagcatcagagagtcatcagtaaagctggcatccccattggaagagaacactttatt

SEQ ID NO: 46 - protein, 243 aa, Macropus eugenii
HLIRDIINQRCGSNPLIGRPNKVTTVDRFQGQQNDYILLSLVRTRAVGHLRDVRRLVVAMSRARLGLYIFARVSLFQNCFELTPAFNQLTARPLHLQIIPTEHFPTTRKNGENPSHPVQIIKNMPQMANFVYNMYMLMIQSTHHYNQALLPPPAMVEESDTVQNQEAEMEVEVEPSHPPSETTPTTAEAVLTMAEAAPTTVTPAASEGTETDSTPAPAETEVTPKHQRVISKAGIPIGREHFI

SEQ ID NO: 47 - DNA, 718 bp, Macropus eugenii
  misc_feature (670)..(670): n is a, c, g, or t
tctggagctgtccgaggagcaccgcgagcacctgagcttcctgcccaaggtggactacgccgtggtcgccgagttcggccggatcgccctggagtttctgaggaaagggtccaacccgaaagtctacgaaggagccgccagaaaactcagtgttagtagtaatacaatccagcatggagttgagggattaacatacctactcacagaaagctcaaaactcatgatttctgaactggatttccaagattctgtgcttgttttgggattcagtgaagacttgaataaattgttacttcagctttatcttgacaacagaaaggaaatcagaacaattctgagtgagttggcaccagagttcccgagttaccacaatcttgagtggagattagatgtacagcttgccagcagatgtctaagacaacagattaaacctgcaatgactctaaagctgcacctaagtcagaatggagagcatagcagccaggttttgcagactgacccagctaccttgctccatttgattcagcaactggaacaagcattaggagaaatgaaaacaaaccactgcaggagaattgttcgaaatatcaaatagtattggattttgtgttgtaaatctgttcagatgatttataaagcaatgtaaaagaacaagcattggttggaattnctttttcttgaaattaagtgggttaaacatctgaattaggtggacttt

SEQ ID NO: 48 - protein, 197 aa, Macropus eugenii
LELSEEHREHLSFLPKVDYAVVAEFGRIALEFLRKGSNPKVYEGAARKLSVSSNTIQHGVEGLTYLLTESSKLMISELDFQDSVLVLGFSEDLNKLLLQLYLDNRKEIRTILSELAPEFPSYHNLEWRLDVQLASRCLRQQIKPAMTLKLHLSQNGEHSSQVLQTDPATLLHLIQQLEQALGEMKTNHCRRIVRNIK

SEQ ID NO: 49 - DNA, 712 bp, Macropus eugenii
  misc_feature (608)..(608): n is a, c, g, or t
  misc_feature (652)..(652): n is a, c, g, or t
gaacaaatagttgctatcgagcagagtgtcaatgagaagatccgaaatcggctacctgtgactgtgatggaactgagcctggatgatcctgaggtggagaaggtgaagggcttgggtttaccagatgaccatgcagggcctattcgtgtcatcaccattgagggtgtcgactccaatatgtgctgtggaactcacgtgagaaatctcagcgacctgcaagtcattaagatcctaggtacagagaaagggaaaaagaacaagaccaacctagtgtttctagcagggaaccgggtactgaagtggatggagaaaagtcatggagttgaaaaggccttgacggcattactcaagtgtggagtagaagaccatgcagaggctgttcagaaactgcagaactcagccaagctgctccagaagaataatgtgaatctgctcagagacttggccattctcactgcccacagtcttcgagacagtccagacaggggaggagtgattgtcttacacaggaaagatggtgactctgagtttatgaacatcgttgctaatgagtttgggatagaggacacccttctcttcttaaccgtaggggacgagaaaggtgcggngctcttcttacttgcagggccatttgaggcagtggatatgttgngacccagggtagctgaattgcttcaggcaaaggagctgggaagaaaggccgctttagggc

SEQ ID NO: 50 - protein, 238 aa, Macropus eugenii
  misc_feature (203)..(203): Xaa can be any naturally occurring amino acid
  misc_feature (218)..(218): Xaa can be any naturally occurring amino acid
  misc_feature (238)..(238): Xaa can be any naturally occurring amino acid
EQIVAIEQSVNEKIRNRLPVTVMELSLDDPEVEKVKGLGLPDDHAGPIRVITIEGVDSNMCCGTHVRNLSDLQVIKILGTEKGKKNKTNLVFLAGNRVLKWMEKSHGVEKALTALLKCGVEDHAEAVQKLQNSAKLLQKNNVNLLRDLAILTAHSLRDSPDRGGVIVLHRKDGDSEFMNIVANEFGIEDTLLFLTVGDEKGAXLFLLAGPFEAVDMLXPRVAELLQAKELGRKAALGX

SEQ ID NO: 51 - DNA, 722 bp, Macropus eugenii
  misc_feature (588)..(588): n is a, c, g, or t
gtgaagattcccagcaagacgtcagccaagtatcttgagaagaaatttaacaaatcagaaaagtatatctcagagaacattctcgttctggatatattttttgaagctctcaattatgagacaattgagcagaagaaagcatatgaagtcgcagccttacttggggacatcggtggtcagatgggattgtttatcggtgctagtatccttacaatcctagagctctttgattatatttacgagctgataaaagagaagttgttagatctactcgggaaagaggaagaggaagggagtcacgatgaaaacgtgagtacctgcgacacgatgccaaaccactctgaaaccatcagccacactgtgaacgtgcccctgcagacgactctggggaccctggaggagattgcctgctgacaccccccaccccgaggacggtcccgtcccccaccccaatgaaataaaccagaactttgagaccctgagacccaggaaaggggacggcaagctcagggctgaacccaatgaaaagagtcgatctctatgcatttaaaaatatctatatatatacaccacacatacacacaacanaacaaaacaatctgccaaaacctagcaagagccacctttgacttgattccgtcctcgttccccatggggtgtgactcttctcgagaagagaattccaattctggaactgtgcgtgaacaaagctggccaattct

SEQ ID NO: 52 - protein, 137 aa, Macropus eugenii
VKIPSKTSAKYLEKKFNKSEKYISENILVLDIFFEALNYETIEQKKAYEVAALLGDIGGQMGLFIGASILTILELFDYIYELIKEKLLDLLGKEEEEGSHDENVSTCDTMPNHSETISHTVNVPLQTTLGTLEEIAC

SEQ ID NO: 53 - DNA, 717 bp, Macropus eugenii
gcaggtctgaagcgggcggctgtgcagagatgaagctcaacatctctttcccagccactggctgtcagaaactcatcgaagtggatgatgagagaaagctgcggactttttatgagaaacggatggccactgaagtttctgctgatgctctgggggacgagtggaagggttatgtggtccgaatcagtggtgggaatgacaaacagggctttcccatgaagcagggtgttttggctcatggacgtgtccgcctgctgctcagtaagggtcattcctgctatcgccctagaagaactggagaaagaaaacgtaaatctgttaggggctgtattgtggatgccaacctgagtgtcctcaacttggttatcgtgaagaagggtgagaaggatataccaggactgacagataccactgtgccccgtcgcttggggcccaagagagctagcagaatccgaaaacttttcaacttgtccaaagaagatgatgtccggcagtacgttgtgagaaagcccctcaacaaggaaggtaagaaacccaggaccaaggctcctaaaattcagcgtctggtgactccccgtgttttgcagcacaaacgtagacgcattgctttgaagaagcaacgtacccagaagaacaaggaagaagcagcagaatatgctaagcttttggccaagagaatgaaggaggctaaagaaaacgacaagaacagatcgctat

SEQ ID NO: 54 - protein, 239 aa, Macropus eugenii
  misc_feature (239)..(239): Xaa can be any naturally occurring amino acid
RSEAGGCAEMKLNISFPATGCQKLIEVDDERKLRTFYEKRMATEVSADALGDEWKGYVVRISGGNDKQGFPMKQGVLAHGRVRLLLSKGHSCYRPRRTGERKRKSVRGCIVDANLSVLNLVIVKKGEKDIPGLTDTTVPRRLGPKRASRIRKLFNLSKEDDVRQYVVRKPLNKEGKKPRTKAPKIQRLVTPRVLQHKRRRIALKKQRTQKNKEEAAEYAKLLAKRMKEAKENDKNRSLX

SEQ ID NO: 55 - DNA, 731 bp, Macropus eugenii
ctgggctcagccctgggccccacacgctccatgcccatgctgtgctcttccctggtggaagagaatgaaggctttgcctcatctctgactgtccaggaagcccaggcccccctgcagctgaagcgtgttccccagcaggccaaggggccccctgtggtcctgggcctcacagtagaagcctctgagatcctctattcactggagctacgcttccgagtcctggggccacactatgagccactggaggccatccgggtcccctgccttcgccctggtgcttcccccaagctgctccttcttcctctagagccccggcgcccctatccggccctcctggacatcagtgtcctctatgccacccccagcggcctcacctgctacgcacagctgcccagccttcctgtagcttttgctgacctctttctgcctttgccatcatcttctctggatgggacccaccctcataccttccatgaactctgggcctcctgccttcctgggggagcagagagttgcatgtggggcccttggcagggccaggcactagagactctggtgaccaagcactgggagccttttgtcatgtctgccatgccacccaccagttaccaggtagcgatctgtctgccccccagctctcagctgttgctgcacctggaggctgttggggaggacggcgtgagggtgaccctgaggactgatgactgggccatattgcctctggctgggga

SEQ ID NO: 56 - protein, 244 aa, Macropus eugenii
  misc_feature (244)..(244): Xaa can be any naturally occurring amino acid
LGSALGPTRSMPMLCSSLVEENEGFASSLTVQEAQAPLQLKRVPQQAKGPPVVLGLTVEASEILYSLELRFRVLGPHYEPLEAIRVPCLRPGASPKLLLLPLEPRRPYPALLDISVLYATPSGLTCYAQLPSLPVAFADLFLPLPSSSLDGTHPHTFHELWASCLPGGAESCMWGPWQGQALETLVTKHWEPFVMSAMPPTSYQVAICLPPSSQLLLHLEAVGEDGVRVTLRTDDWAILPLAGX

SEQ ID NO: 57 - DNA, 723 bp, Macropus eugenii
cagtaatcaataccatgtgtggccgaggtatgcaagctcttgactacctggaggctggtaaagtcatctacactaatggctgcattgacaagctagtcaactggatccacagcaacctcttcctcattgggggtgtggcactgggcctagccatccctcagctggtgggcatcctgctatctcaggtccttatcaatcagatcaaagatcaggtcaagttacaactctacaattggcagcaccgggctgacctgtggtactgaacacccccaccaagatgaaaggtgggcatcatctactgacagcactgggcacaacgctgggcaaagaacagagatttggattcccaaatgtcactggatgcccagtgacaaagagcaagctccagacaggcagacaaaggcaagacgtgcagatggccttcatcccagaaggatggtcctccctcaccctgggctgtgccacagttttctgagagaggttttttggtttggttttgtttttatttgttgggtctgtttggggtttttgaaacttacattcaaacataaatgttttaggggatgccagttgcacagtgttgcagtgggaccagcttccttctcatgcaggcatcacagtaaccagcccagccttttctgtccctggacactcaaattagtgccaactagatttaggcactggagggaatagtacaccagtagcccctgccctgggtccagc

SEQ ID NO: 58 - protein, 157 aa, Macropus eugenii
  misc_feature (83)..(83): Xaa can be any naturally occurring amino acid
VINTMCGRGMQALDYLEAGKVIYTNGCIDKLVNWIHSNLFLIGGVALGLAIPQLVGILLSQVLINQIKDQVKLQLYNWQHRAXPVVLNTPTKMKGGHHLLTALGTTLGKEQRFGFPNVTGCPVTKSKLQTGRQRQDVQMAFIPEGWSSLTLGCATVF

SEQ ID NO: 59 - DNA, 714 bp, Macropus eugenii
cggaaccgaaccgggtaatggaccggcccccggacctgttcgatgccatcgtgatggcggaggagaggtatcatggcgaaggctatcaggaaggttacactgaaggcagctgtctgggtctgactgaggggaggcaatatggagtgtctcacggcgctaacatcgggtctgagattgggtgttaccaaggttttgcatttacatggaaatgtctgctttctgagtgcacaactgaaaaggacaggtttgctctttgctaagtgtccagccaaacttcagagtcagtcccggagcccctgcactttcgttttgagcatgacaggaagacagaggcagcattaaggaccaactgtctgtatgttaagtgtttaaaaatgaaattagagtccagtgaccagacatccgtgtcctgaagtgagggttaccgtctcttcatgaaaagacttctcttggtggtacttcttggtgttctctctatatgggcccgttctttgacaggggtgcgcctgtgctgtggcctacatgggaaccagggacgagcttctttgaaagtcatggacactgtaaccctctgtgaggggagagaggggaggaccgtatggatggggggatggttgctcctgattccatcttgtttttctttagtattgtctttctaaaatgctagtgggctgtgagcttacttggttattattaccttatgtattcgtattt

SEQ ID NO: 60 - protein, 85 aa, Macropus eugenii
EPNRVMDRPPDLFDAIVMAEERYHGEGYQEGYTEGSCLGLTEGRQYGVSHGANIGSEIGCYQGFAFTWKCLLSECTTEKDRFALC

SEQ ID NO: 61 - DNA, 761 bp, Macropus eugenii
  misc_feature (747)..(747): n is a, c, g, or t
  misc_feature (756)..(756): n is a, c, g, or t
  misc_feature (758)..(758): n is a, c, g, or t
ggcggccctccccgtgatggtggtggtggccctggtgggcctgaacctgagctgcctcccattactgagggctctgatgctagggcagggccccctgccccagcccccccagctcccacactagcccctagcctgcctgacccaccaccacctcagagcacagaaatgcgttcagtacttcgtaaggggggttccccccgcaaggcccgccgggcccgccttaaccccttggtattactgttggatgcagcactcactggggagctggatgtggtgcagcaggcagtgaaggagataaatgatcccagccagcccaatgaggagggcatcacggccctgcacaatgccatttgtggtgccaactatgccattgtagacttcctcattggtactggtgccaatgttaactccccggacagccatggctggacgcccttacattgcgcagcctcttgcaatgacacagccatatgtacagccttggtgcagcatggggctgccatctttgctacaaccctgagtgatggggccatggccattgagaagtgtgacccttaccgggagggctatgcagactgtgccacctacctggcagaggccgagcagagcatgggccacctgcatggaggggcagtctatgcactctgggactacagtgccgagtttggggatgagctgtccttcgtgagggtgaccccgtactgtcctacgccgagatgcccctgaggagactgactgttggtgggncagcctgcngngcc

SEQ ID NO: 62 - protein, 254 aa, Macropus eugenii
  misc_feature (20)..(20): Xaa can be any naturally occurring amino acid
  misc_feature (235)..(235): Xaa can be any naturally occurring amino acid
  misc_feature (250)..(250): Xaa can be any naturally occurring amino acid
  misc_feature (253)..(253): Xaa can be any naturally occurring amino acid
AALPVMVVVALVGLNLSCLXITEGSDARAGPPAPAPPAPTLAPSLPDPPPPQSTEMRSVLRKGGSPRKARRARLNPLVLLLDAALTGELDVVQQAVKEINDPSQPNEEGITALHNAICGANYAIVDFLIGTGANVNSPDSHGWTPLHCAASCNDTAICTALVQHGAAIFATTLSDGAMAIEKCDPYREGYADCATYLAEAEQSMGHLHGGAVYALWDYSAEFGDELSFVRVTPYXSYAEMPLRRLTVGGXACXA

SEQ ID NO: 63 - DNA, 767 bp, Macropus eugenii
  misc_feature (686)..(687): n is a, c, g, or t
  misc_feature (728)..(728): n is a, c, g, or t
gtacatgtcatgctaatgccatccttggaatcagagagggcttatttggggtaggtagggttattcagggcccagactagggcactgactttcccagggtcacagagggcatttcagcctggatgtggttttcttccacctcttccccagaactgctacctaaaggaagtaaagaggagcaacgagattatgtcttctacctggctgtggggaactaccgcctcaaggaatatgagaaggctctgaagtacgtgagagggttactgcagactgagccccagaacaaccaggccaaggagctagaaagccttattgataaggctatgaagaaaggtgagtcttcctcctttcctgccttttatacctctcaccttgcagctctctctgaactcctgacccctccccagttaccttcccaaccctagctcctcatcatccctcaagttccccctcaattatcattttgctcttagccctcactctccccagaaatctttctgcccttcagccgtgttcttttctccatattatttcatatgcaaacacttcaggaggctttgagtggcaaccagtggtttccagggggaacgggatttgtagaatcaggtttctcattcaagtcctcacactgttttctttttcccagatggactggtaggcatggctatcgtggggggcatggcccnntggtgtggctgggctttgctggcctaattggacttgctgtngccaagtctaagtcttgagctgctctacctctgctacct

SEQ ID NO: 64 - protein, 71 aa, Macropus eugenii
  misc_feature (66)..(66): Xaa can be any naturally occurring amino acid
MWFSSTSSPELLPKGSKEEQRDYVFYLAVGNYRLKEYEKALKYVRGLLQTEPQNNQAKELESLIDXGYEER

SEQ ID NO: 65 - DNA, 742 bp, Macropus eugenii
  misc_feature (543)..(543): n is a, c, g, or t
aactggtggagttggctttgtgggacacagctggccaagaagattatgaccgccttagacctctctcctacccagacactgatgttatacttatgtgtttctccatcgatagccctgatagtttagaaaacatcccagagaagtggaccccggaggtgaagcatttctgtcccaatgtgcccattatcctggttgggaacaaaaaggatcttcgaaatgatgagcacacgagacgagagctggccaagatgaagcaggagccagtgaaacctgaagaaggcagagatatggcaaatcgaattggtgcatttggttatatggagtgttcagcaaagaccaaagacggtgtgagggaggtttttgaaatggccacaagagcggctttgcaagccagacgtggaaagaagaaatccgggtgccttgtcttgtaaacacagtggaaagcccaagccctcactcggttaatttttgaagtgctgtttattaatcttagtgtatgattactggcctttttcatttatctataatttactttaagagatntacaaatcagaaatcatcttgctaccagtatttagaagccaaccatgattgtttaatgacagtctgtgtccaacacacctgtgcacaccagggtccctctgacattactcttaataacctcttcattctcccaaccagcacatctggcactaattcaggggattcttaactcttgcttcttttagaagagaaaggtata

SEQ ID NO: 66 - protein, 153 aa, Macropus eugenii
LVELALWDTAGQEDYDRLRPLSYPDTDVILMCFSIDSPDSLENIPEKWTPEVKHFCPNVPIILVGNKKDLRNDEHTRRELAKMKQEPVKPEEGRDMANRIGAFGYMECSAKTKDGVREVFEMAKERLCKPDVERRNPGALSCKHSGKPKPSLG

SEQ ID NO: 67 - DNA, 781 bp, Macropus eugenii
  misc_feature (517)..(517): n is a, c, g, or t
  misc_feature (690)..(690): n is a, c, g, or t
ggagaaggtgacatccctgggaaaggattggcaccggccttgccttcgctgtgagcgttgtggaaagacactgacacctggtggacatgcagagcatgatggacaaccatattgccataaaccttgctatggaattctctttggaccaaaaggagtgaatactggggcagtggggagctacatctatgacaaagaccctgaagttaaggatcagccctaggaggtcctgacccttcgatgtgatgcccagcctgctgttctcagttcttctgggggagtaagcactccccactgttgcctgcataagaagcttatttctgagggggtgtgaataacgtggttcagctttgtgtatgagtttgagggtacattcttaaggattccccagaattgctgaggtccacctgggtgtccctcccattcttattatatctcctacttttctctctccctttcagtctttttgggtttacctcctccaccttcctagccacccttctcagcctcccacccactntctgttttcattacttcttttctctcattcccctgttttcctttctctttgttgctaagaggctgtaggttctactatctgtctccccctcttttttctcctcaccctagcatcctgtattccatgtttatttatgaaaaggatttggtcctactttggctaaaagacaactntctgtccctcacagtgtactgagcagctaaggccagagtgttctctttagagctcttctgcatcatttccacttatgcaccaatacctcac

SEQ ID NO: 68 - protein, 109 aa, Macropus eugenii
  misc_feature (71)..(71): Xaa can be any naturally occurring amino acid
EKVTSLGKDWHRPCLRCERCGKTLTPGGHAEHDGQPYCHKPCYGILFGPKGVNTGAVGSYIYDKDPEVKDXALEVLTLRCDAQPAVLSSSGGVSTPHCCLHKKLISEGV

SEQ ID NO: 69 - DNA, 772 bp, Macropus eugenii
  misc_feature (588)..(588): n is a, c, g, or t
  misc_feature (595)..(595): n is a, c, g, or t
  misc_feature (614)..(614): n is a, c, g, or t
  misc_feature (676)..(676): n is a, c, g, or t
  misc_feature (692)..(692): n is a, c, g, or t
  misc_feature (703)..(703): n is a, c, g, or t
  misc_feature (728)..(728): n is a, c, g, or t
  misc_feature (745)..(745): n is a, c, g, or t
ctgatattctgggaatttaaaggacttcaaaccaaataataagtcccctgtgcagaagccactgttactagaaagttcttcagtttcatcattctgtcttcctcttcctggtcttctctttatctctaattttccaggataatttgagttacatttttaaagacaattgttttgatttttaaaaccagaaaggtccagttgtaagaacccaaatatgggccagagactaacatctgcctccttgaaggcccttccagcttttgtggggccacagacaagaagtggcaaggtctctaatggagctgaaggcagagtaaagaaagctgagccagtcattgggcattgacttgttacctttggctggagaatccttgcaaaaccagagtcagcattgtgttctgtgggatcatggtgaacagccctttgtgcctaagtgaaaactgtcaagttcttggaagattccacaaatatcctgctctgctcatgtagaaatgttccagtggtataaagtcttgagttcttcaattggcttcctttggcaatgctgaggattcactcaatctgacttcattcatctgtacaatgcanaacatantcatgtgctacctcataantatactatgtgacttacctagtgaccaaaatacactgagactgctgtgggtgactccacagnttagctctcacccttngtatgctatgntggcccttccataccatcatttggntagccctgtcccttaantatgctctgtacttcaggatccaaatt

SEQ ID NO: 70 - protein, 112 aa, Macropus eugenii
  misc_feature (64)..(64): Xaa can be any naturally occurring amino acid
MTGSAFFTLPSAPLETLPLLVCGPTKAGRAFKEADVVSGPYLGSYNWTFLVLKIKTIVFKNVTXNYPGKLEIKRRPGRGRQNDETEELSSNSGFCTGDLLFGLKSFKFPEYQ

SEQ ID NO: 71 - DNA, 755 bp, Macropus eugenii
  misc_feature (674)..(674): n is a, c, g, or t
cccgccaggtgtttgtgctgctgttcatttttgtgaagaggcagatcatgcgttttgctatgaagtctcgaagaggcccccacgtccctgtggggcacaacgcccccaaggatctgaaggaagagattgacatccgactctccaaggtccaggatgtaaagtatgaaccccagcttcttgaagaagatgatgccagacttctgcagctggagacaccaggaaatcaacattgctacaactacctgtacaggatgaaagcactggatgccattcgtgcctctgagatcccattccattcagaaggccggcatccttgttccctgatgggcaagaacttccgctcctatctgctggagcttcgaaacacaagtacccccttcaagggtgtccgaaaagctctcattgataccctgctagatggctatgagacagctcgatatggaactggtgtctttggtcagactgaatatctacactatcaggaagcactgagtgaactggctgccgctgtcaaagcccgtggggggagctcccagcggcagcaccagtcggcagctaaggatctaacacagtcgcctgaagtttcctccccaacaactatccaggtcacctatctgccctccagccagaagagtaaaagagccaagcacttcctagagctgaaagagtttaanggatactacaacacactagagagcaccctctgactgaatttggggataatcatagccaacatgggctcagtaggagaatcc

SEQ ID NO: 72 - protein, 234 aa, Macropus eugenii
  misc_feature (224)..(224): Xaa can be any naturally occurring amino acid
RQVFVLLFIFVKRQIMRFAMKSRRGPHVPVGHNAPKDLKEEIDIRLSKVQDVKYEPQLLEEDDARLLQLETPGNQHCYNYLYRMKALDAIRASEIPFHSEGRHPCSLMGKNFRSYLLELRNTSTPFKGVRKALIDTLLDGYETARYGTGVFGQTEYLHYQEALSELAAAVKARGGSSQRQHQSAAKDLTQSPEVSSPTTIQVTYLPSSQKSKRAKHFLELKEFXGYYNTLESTL

SEQ ID NO: 73 - DNA, 755 bp, Macropus eugenii
  misc_feature (620)..(620): n is a, c, g, or t
  misc_feature (666)..(666): n is a, c, g, or t
tatggaacaaccaaccttcacttagatatatctgatgcagctaatgtaatggtctacgtgggcatccccacagggcagcttgaccaggaagatgaagtccttaaaactatccaagatggcgactgggatgagctcacaataaagcgggttattgaaggaaaagagaaaccaggagctctttggcatatttttgctgctaaagacacagagaagatccgatccttccttaaaaaggtctcagaagaacaaggtcaagaaaaccctgctgatcatgaccctattcatgaccagagctggtacttggaccgtccgctcacaagacgtcttcatcacgagtatggcgtccagggctgggctatcgtgcagtttctgggggatgttgtcttcatcccagcaggtgccccacatcaggttcataacttgtacagttgcataaaagtggcagaagattctgtttctccagagcatgtcaaacactgcttgtggctcactcaggaatctggctatttgtctcagacacacactaaccatgaagataagctacaggtgaagagtgtgatctaccatgcagtgatagatgctgtcgcaatattaaaagccaacgagtctggctacagcanaccttatgatccagaagcctactggaactgcactactggcagctgntgagagtcagccttctgaagttctgtgggctaggaatcacgctacatcgatcctctttataagtagtgcctgactgagtacgtactttg

SEQ ID NO: 74 - protein, 246 aa, Macropus eugenii
  misc_feature (207)..(207): Xaa can be any naturally occurring amino acid
  misc_feature (222)..(222): Xaa can be any naturally occurring amino acid
YGTTNLHLDISDAANVMVYVGIPTGQLDQEDEVLKTIQDGDWDELTIKRVIEGKEKPGALWHIFAAKDTEKIRSFLKKVSEEQGQENPADHDPIHDQSWYLDRPLTRRLHHEYGVQGWAIVQFLGDVVFIPAGAPHQVHNLYSCIKVAEDSVSPEHVKHCLWLTQESGYLSQTHTNHEDKLQVKSVIYHAVIDAVAILKANESGYSXPYDPEATGTALLAAXESQPSEVLWARNHATSILFKVVPD

SEQ ID NO: 75 - DNA, 785 bp, Macropus eugenii
  misc_feature (597)..(597): n is a, c, g, or t
  misc_feature (639)..(639): n is a, c, g, or t
  misc_feature (680)..(680): n is a, c, g, or t
tgctgatgaaaattcccacaacaaggctcgaacgtcaccttatccaggttcaaaagttgaacgtagtcaggtacccaatgagaaagtgggctggcttgttgagtggcaggagtataatcccgtggaatatactgccgtctctgtcttggctggacccatgtgggcagatccacagatcagtgagagaaatttttctccaaagtttaatgaaaaggatggacatgttgaacgaaagagccagaatggcttgtatgagattgaaaatggacgacctagaaatccagcagggcggacaggactgattggccgaggacttttgggacgttggggcccaaaccatgctgcagatcccatcattactaggtggaaaagggacagcagtggaaataaagtcattcaccctcattctgggaaaaatatcttacagtttgtagcaatcaaaaggaaagattgtggagaatgggcaatcccaggggggatggtggatccaggagagaaaatcagtgctacgttaaaacgagagtttggtgaagaagctatgaactccttacagaaatccagtgctgagaagcaggagatggaggagcagctccacanactcttcagccaagaacatttagtggtttataaaggatatgntgatgatccctcggaacactgatatgcatggatggagacangagctgtgaactatcacgatgaaacgggtgagacaatggataatctggctcctgaagcaggagatgatgctgggaaagtgagatgggtggacatcaatgacaagt

SEQ ID NO: 76 - protein, 262 aa, Macropus eugenii
  misc_feature (199)..(199): Xaa can be any naturally occurring amino acid
  misc_feature (213)..(213): Xaa can be any naturally occurring amino acid
  misc_feature (227)..(227): Xaa can be any naturally occurring amino acid
  misc_feature (262)..(262): Xaa can be any naturally occurring amino acid
ADENSHNKARTSPYPGSKVERSQVPNEKVGWLVEWQEYNPVEYTAVSVLAGPMWADPQISERNFSPKFNEKDGHVERKSQNGLYEIENGRPRNPAGRTGLIGRGLLGRWGPNHAADPIITRWKRDSSGNKVIHPHSGKNILQFVAIKRKDCGEWAIPGGMVDPGEKISATLKREFGEEAMNSLQKSSAEKQEMEEQLHXLFSQEHLVVYKGYXDDPSGTLICMDGDXSCELSDETGETMDNLAPEAGDDAGKVRWVDINDKX

SEQ ID NO: 77 - DNA, 758 bp, Macropus eugenii
  misc_feature (692)..(692): n is a, c, g, or t
  misc_feature (695)..(695): n is a, c, g, or t
caaagctctgcaggtgcccctgctgtgcttatgttgacctgttgcccccaggaaaactgatcggaaggttctacaaggagaatggagaccccactcctgcgctcctcctggctgaggccgccatggcccagggagacgctgccagggagacagaaaagcagcagcggcagcacttccccgcgtgtaactcagagtggagctctggtggccctagccgcttctggtgctccaagcagagtggaggcataagcagggactggacaggggtccccaggaagctgtatcagccaggtgggaagaagccacgatgtgtatgtgtgagaaccacggggccccccaccggccaggcaagccccaccggccatgatgaccgcggagacttggacaacccgagcctgcaggagtacatgggctgcccaccgctggccagcagctgtaccttacaagactgagccctttggggcgctatcaggaagccccatccagagggccctgacctggacagagggagggagagaagggcagagagaggaaaggagagaaaagaaaaggaagttcctgagaggtgcatcctgctgcagaaggagggagcctcctgctgctaaaccctgccaggcttctgggggcagctgtccagcaggaagaaagggctccgagggctaaagctatctgaagatggctgggagggaggntangctgcacaggccaatctcacccacaaagaataacttgggagtgttgatggcagatgttggaag

SEQ ID NO: 78 - protein, 149 aa, Macropus eugenii
KALQVPLLCFVDLLPPGKLIGRFYKENGDPTPALLLAEAAMAQGDAARETEKQQRQHFPACNSEWSSGGPSRFWCSKQSGGISRDWTGVPRKLYQPGGKKPRCVCVRTTGPPTGQASPTGHDDRGDLDNPSLQEYMGCPPLASSCTLQD

SEQ ID NO: 79 - DNA, 763 bp, Macropus eugenii
  misc_feature (760)..(760): n is a, c, g, or t
cttgaaatagccaaagctaatgcagctgccatgtgtgctaaggctggtgttcctttaccgccaaacctaaaacctgcacctccaccaactgtagaagagaaagttgctaaaaagtcaggaggagccacaatagaagagctcactgagttttagaagccaaactgactgaggcgcgggacgtttcgtttgaatggaggaggtgttgagtgagcaacacgcagaagcgcgcctaccgtttcgtttccattcacgacgtgttcactgaccgccacgagtgtactacacatacgcaaagacacagacaatcttcagaaatgatcttttgccaccggagcttggaaattaatgagaatagccggccattgcctgaaaggaacttctttcgcatcaacatttcgggttttggccgctcggtaccagccgttgtcgataatggccggccattatcagttcttcctgcggttcgggttttggcagtaacatatattaagcatatttactgttttcatttggtcttttcagttgaggcttgttttgtgggttttttttttttttttgagaacgctgaaatattgctgctaggatccagaaaataccacattgtttcatatgttgaaacttgttattggctagccttatgccagccctccactgtcaatactttctgtttcttttggtcacaagccttatataaatttgtcttttggctaaatgagcccccttttgtgatattttcaaattgataatggatgtgaagaantct

SEQ ID NO: 80 - protein, 143 aa, Macropus eugenii
  misc_feature (49)..(49): Xaa can be any naturally occurring amino acid
LEIAKANAAAMCAKAGVPLPPNLKPAPPPTVEEKVAKKSGGATIEELTXVLEAKLTEAREFRLNGGGVDEQQQKRAYRFVSIHDVFTDRHECTTHTQRHRQSSEMIFCHRSLEINENSRPLPERNFFRINISGFGRSGTSRCR

SEQ ID NO: 81 - DNA, 753 bp, Macropus eugenii
  misc_feature (653)..(653): n is a, c, g, or t
  misc_feature (679)..(679): n is a, c, g, or t
  misc_feature (700)..(700): n is a, c, g, or t
  misc_feature (747)..(747): n is a, c, g, or t
gatggcgtctgcagatgctgacggaggggtggctgctgctgctgtagcggcgggcgaggctctggcttcagccgcgagggccttagcggcccccagggtgcaggacgatgtttcccccgctctgctggtagagttcctgaaggactctcggaagaaggagaagttgctgtggggccagctccaggtgcttggcgccctccagggcttcctggagcacgtggacatgactgtgaacatggaagaggaaatccgggcagaagccagcgcggcccaacagctctggaagaacctgaaagctgagcaccagaatcaggtggaagccattgaggctgccttgccgaaggccctagaacaactggaggccagcaagaggaagcaggctttattagggactgctctgaggcaggcccaggccaaaaggcaggctttggaggagcggaggaacatggcccaggctcagcagaggcgagggcaggaaaagcgaaggctgcagttggtggctggggcccaggcccagagtgagcatctggagaatgccaacaaacgctgggctcaggcgctaacacttcagcatgaagagcgagagaatgcccagagacttggcacctttctgggacttctggagatgctgcatggtgctgagggggatggangaaaaggccccacatggaggctgcanagggaaagtgggtgcagcgangggctgcccaccactccagttcttctacctgagggcagaggctacanggaata

SEQ ID NO: 82 - protein, 251 aa, Macropus eugenii
  misc_feature (217)..(217): Xaa can be any naturally occurring amino acid
  misc_feature (226)..(226): Xaa can be any naturally occurring amino acid
  misc_feature (233)..(233): Xaa can be any naturally occurring amino acid
  misc_feature (249)..(249): Xaa can be any naturally occurring amino acid
  misc_feature (251)..(251): Xaa can be any naturally occurring amino acid
MASADADGGVAAAAVAAGEALASAARALAAPRVQDDVSPALLVEFLKDSRKKEKLLWGQLQVLGALQGFLEHVDMTVNMEEEIRAEASAAQQLWKNLKAEHQNQVEAIEAALPKALEQLEASKRKQALLGTALRQAQAKRQALEERRNMAQAQQRRGQEKRRLQLVAGAQAQSEHLENANKRWAQALTLQHEERENAQRLGTFLGLLEMLLVLRGMXEKAPHGGCXGKVGAAXGCPPLQFFYLRAEATXNX

SEQ ID NO: 83 - DNA, 757 bp, Macropus eugenii
  misc_feature (585)..(585): n is a, c, g, or t
gtcaagaggctcaatggaatttgtgctcaagtcttgccctacctttcacaagagcaccaacagcaggtcttgggggcaattgagcgagccaagcaggtaactgctccggagctgaactccatcatccggcagcagctccaggctcaccagctgtcccagctccaggccctggccttgcccctgactccgctacctgtgggcctgcagccaccatctctgccagctgtcagcgcaggcactggcctcctctccctgtcggccttgggctctcaggcccacctttctaaggaggataagaacgggcatgatggggatgcccaccaggatgacgatggtgacaagtcagattagaggcacagtccgggggtggggaaaggcttggtattcatggtggctactggcacctcagtgccagccagcccatctcagacattgcccccagccccctgccagccccttccccttcccctaaatcccttggggtgtgaatgggaccggaccgggtcggaagggaataaaagaatgaacccaccttagctccaagcgcctcccccccttccctgtgcacatatgtaaccgaccccnctccctttcctgctccccccgttcggcctgtttgctgcgcacccagcacagcagttccccagtcccctcctggtactgcatgcaatcacggatgccagccggccccgggtttctccccttcatcccccccatgtagaggctctaccctgttcactccctctttcctccttct

SEQ ID NO: 84 - protein, 116 aa, Macropus eugenii
VKRLNGICAQVLPYLSQEHQQQVLGAIERAKQVTAPELNSIIRQQLQAHQLSQLQALALPLTPLPVGLQPPSLPAVSAGTGLLSLSALGSQAHLSKEDKNGHDGDAHQDDDGDKSD

SEQ ID NO: 85 - DNA, 770 bp, Macropus eugenii
ccagaacagaccatgcaatctttcctggtccttgtcctcttaggaggaatagtctgtagtctccatggtgcactttcagaggagctctctggcactggtacccttttctccattagtgggcagtattttggagacactgtgcgggccataaaatttttctttggaccactgggcttcttaagaggcatacaggcaaaaatcggtgatgaatggagtcccagatacggagtctcagggggcagtgagtcgagtctcattctctatgatggagaaagcataataagagtgtcaggccagggtaaggtctgcatccgtttcatagagatggaaaccaacactgggagaattttcagagaggggaagtctatcggcaactattttgacaagtacccaccttatgaggatatggagctcagtggcatcaggggtttatatggaattacatgtatcaaaaaactggaatttgattggtcatacatttctgaaatatttaccacaactgaaataccttcagcaataccttcaacacctgttttagatcctattaaagccctctgctgaagacacctcagctgggcctactgaaacacctaagtgccttccaacacaccttagctgattccctattgaagacacctaacctaacaatgccattgcttagcattatacaactactgaaccactatcttaggcctttatttcttctacgaaagaatacaaccctgcacttcccctgagatttcctttcaacctataaataccgtgacctg

SEQ ID NO: 86 - protein, 186 aa, Macropus eugenii
PEQTMQSFLVLVLLGGIVCSLHGALSEELSGTGTLFSISGQYFGDTVRAIKFFFGPLGFLRGIQAKIGDEWSPRYGVSGGSESSLILYDGESIIRVSGQGKVCIRFIEMETNTGRIFREGKSIGNYFDKYPPYEDMELSGIRGLYGITCIKKLEFDWSYISEIFTTTEIPSAIPSTPVLDPIKALC

SEQ ID NO: 87 - DNA, 675 bp, Macropus eugenii
  misc_feature (606)..(606): n is a, c, g, or t
  misc_feature (611)..(611): n is a, c, g, or t
  misc_feature (617)..(617): n is a, c, g, or t
cgcgcaggagggagctcgtggcggccctcatggcgtctgcccctgcctgcgtccgccgagtcctgcttttgctgctgcttctcaatggggtctcgctctgctcagcggagccctgcactgatcctgtgattactccttcctactataccacctctgatgcagtcatttccacggaaactgttttcatcgttgagatctctctgatgtgcaagaatggggcacagaatgtggccctttatgctgatgttaacggaaagcagtttccggtgacccgtggccaggatattggacgttatcaggtgtcctggagcttggaacataagaatgcccattctggaacttatgaagtcaagttctttgatgaagaatcctacagtcttttgagaaaggcccagagaagcaatgaagatgtctcagctattagacccttgttcacagtccacgtggatcaccgaggtgcctggaatggaccttgggtctctactgaagtgctggctgcaatgatcggcatgatggtttattacatggccttcagtgccaaaagcaacattcaggcctgagtcataagaattgagctgctctgcatagaagtttttcttcatgcanaatanaagggnttgtcactggagaaaacgatgtcatgggcaaaaaaaaaaaaaaaaaaaaaaaaaaaag

SEQ ID NO: 88 - protein, 176 aa, Macropus eugenii
MASAPACVRRVLLLLLLLNGVSLCSAEPCTDPVITPSYYTTSDAVISTETVFIVEISLMCKNGAQNVALYADVNGKQFPVTRGQDIGRYQVSWSLEHKNAHSGTYEVKFFDEESYSLLRKAQRSNEDVSAIRPLFTVHVDHRGAWNGPWVSTEVLAAMIGMMVYYMAFSAKSNIQA

SEQ ID NO: 89 - DNA, 749 bp, Macropus eugenii
  misc_feature (586)..(586): n is a, c, g, or t
cgggctagttcccccacgtgaccccgctccgtctgccctccccccgtcagcggacccttcccctcctcgctccagttctggtgtccaccccccccattcccccgaggagctcactaggcggcggtccgtccaggctcccttgcttggaagaaggcagagacaggaaatctgactggcatcagacagatcatcttggtcctttctggaaaaggaggggtagggaaaagtaccatttctacagagctagccctggccctccggcattcgggcaagaaggttgggattctggatgtggatctctgcggtcctagcattccccgaatgctaaaagtacaagacaaagctgtgcaccagtgtgacaatggctgggttcctgtgtttgtggaccaagagcaaaccatctccctcatgtccgtgggttttctactggagaaaccagatgaggctgtagtgtggagaggccccaaaaaaaatggactagtagacaagatagaagctccctcctcagtggcagtaccacagacctccaaggagcaggaccactgtcacaacattgataaaacagtttgtctctgatgtggcctgnggtgacctggattatctcattgtggatacaccaccagggacttctgatgagcacatttctgctgtggaagctcttcgcccttataagcctctgggtgcctatttggttactacaccccaggcaatatctgtgggtgatgtcaggagagagctcactttttgca

SEQ ID NO: 90 - protein, 201 aa, Macropus eugenii
  misc_feature (146)..(146): Xaa can be any naturally occurring amino acid
  misc_feature (201)..(201): Xaa can be any naturally occurring amino acid
KKAETGNLTGIRQIILVLSGKGGVGKSTISTELALALRHSGKKVGILDVDLCGPSIPRMLKVQDKAVHQCDNGWVPVFVDQEQTISLMSVGFLLEKPDEAVVWRGPKKNGLVDKIEAPSSVAVPQTSKEQDHCHNIEKQFVSDVAXGDLDYLIVDTPPGTSDEHISAVEALRPYKPLGAYLVTTPQAISVGDVRRELTFCX

SEQ ID NO: 91 - DNA, 735 bp, Macropus eugenii
gccgtgtttccgtcagggcgatggggcggcggggcccggcggggcagctgctgctgtttgcggggttgctgggcctggctggagcttccgacctgcccttcgtcacctgcggctctgtcgtgaagctcctcaacacgcgccacaacgtccggctgcactctcatgacgtacactacgggtccggtagtgggcagcagtcagttacaggtgtatcagatgtggatgacagcaacagttactggcggatcagaggaaaaacctctacagtgtgtgagagaggaaccccagtgagatgtggccaagccatcaggctgactcatgtcaatactgggcgaaatcttcacagtcaccacttcgcctcacccttgtctggcaatcaggaagtgagtgcatttggggaagagggggaaggggactatctggatgactggacagtcctctgcagtgggtcacactgggtgagggacgatgaagttcgcttcagacacgcttctactgatgtgctgctgtctgtcacgggagagcagtatggccggcccatcagtggccagagagaggtgcatggcatggcccagcagagccagaacaactattggagagccatggaaggcatctttatgaagcccaatgagctgcttcggactgaagcccatcacgctgagctgtgagagcccctcagctcttttctccgttttgccccagcgaacaacagtgttgagttacacccactgattt

SEQ ID NO: 92 - protein, 215 aa, Macropus eugenii
MGRRGPAGQLLLFAGLLGLAGASDLPFVTCGSVVKLLNTRHNVRLHSHDVHYGSGSGQQSVTGVSDVDDSNSYWRIRGKTSTVCERGTPVRCGQAIRLTHVNTGRNLHSHHFASPLSGNQEVSAFGEEGEGDYLDDWTVLCSGSHWVRDDEVRFRHASTDVLLSVTGEQYGRPISGQREVHGMAQQSQNNYWRAMEGIFMKPNELLRTEAHHAEL

SEQ ID NO: 93 - DNA, 741 bp, Macropus eugenii
  misc_feature (705)..(705): n is a, c, g, or t
  misc_feature (716)..(717): n is a, c, g, or t
ctccctaccctctaaggaaccttgtgaagcctttgctttttactgtcgggtttacagggtgtgcatttgggtctgctgctatttggcagtatgaatccctgaaatccagggtccagagctactttgatgccgtaaaggcagattggttggacagcttagcacctcagaaggaaggaaacttcaggaggcagattaacaagtggtggaataccttatctgatggccagcgagctgtgacaggaatcatagccgccaatgtctttgtattctgtttgtggcgagtcccttccctccagaggtcaatgatcaagtacttcacatccaatccagcctccagagccctctgctcccccatgctgctctccaccttcagccacttctccttactgcacatggcagccaacatgtatgtgctgtggagcttctccaccagcatcgtcaacatcctggggcaggagcagttcatggctgtctacctgtctgcaggcgtcatttctactttcgtcagttatatctgcaaagtggccacggggagatttggaccctctctcggtgcatcaggcgccatcatgaccgtgctggctgctgtttgtaccaagatccctgaggggaagctggccatcatcttcctgcccatgttcaccttcactgcaggaaacgccctgaaagccattattgccatggacacagccgggatgatcctgngatggaaattnnttgatcatgcagcccatcttgggg

SEQ ID NO: 94 - protein, 247 aa, Macropus eugenii
  misc_feature (235)..(235): Xaa can be any naturally occurring amino acid
  misc_feature (238)..(239): Xaa can be any naturally occurring amino acid
  misc_feature (247)..(247): Xaa can be any naturally occurring amino acid
PYPLRNLVKPLLFTVGFTGCAFGSAAIWQYESLKSRVQSYFDAVKADWLDSLAPQKEGNFRRQINKWWNTLSDGQRAVTGIIAANVFVFCLWRVPSLQRSMIKYFTSNPASRALCSPMLLSTFSHFSLLHMAANMYVLWSFSTSIVNILGQEQFMAVYLSAGVISTFVSYICKVATGRFGPSLGASGAIMTVLAAVCTKIPEGKLAIIFLPMFTFTAGNALKAIIAMDTAGMILXWKXXDHAAHLGX

SEQ ID NO: 95 - DNA, 712 bp, Macropus eugenii
acaactcctgtggcttcggactggcagcagcctgcggtgaagctccctgcgctccgggctcgcagtgctacagtcttcctgcgccatgaactccaaccagacacatctgccccaagccctggggcaaatcaaccgcgccttttctccccccaactacgagctcctctcggaggagcgagagctgcggacgccgggacgggaatccgcctccaccatcatcaacgtccactcctacgagcctcctgccaatgatttcttggtctggtccgtgttcaacacgttgtacatgaacttttgctgcctggggtttatggcgctggtcttttcagtaaaggcccgggaccggaaggtggtgggtgacctaaacggggcccggagctatgggtccaccgccaagtgtctcaacatcttcgcgctgatcttctcccttctgatcgtcattgtgctcaccgcgctgctggccaccggcatcatcgccctcaagagggttgtcacgaacccgagtgagatccctcactactcagatttatttccaggcaattgacttaccgcacttccgccccatgtttaaacccagtctctgggtttaaaccccacccccatcttgtggcttttcttcattctgggtgtggcctctcttcacttgcctccgctcccccacctgggcccctttgtatccaataaaccactttgtttgtacaaaaaaaaaaaa

SEQ ID NO: 96 - protein, 180 aa, Macropus eugenii
TTPVASDWQQPAVKLPALRARSATVFLAMNSNQTHLPQALGQINRAFSPPNYELLSEERELRTPGRESASTIINVHSYEPPANDFLVWSVFNTLYMNFCCLGFMALVFSVKARDRKVVGDLNGARSYGSTAKCLNIFALIFSLLIVIVLTALLATGIIALKRVVTNPSEIPHYSDLFPGN

SEQ ID NO: 97 - DNA, 703 bp, Macropus eugenii
ctttaaagagattgagaacaagcttgaagagggaggagaacagtttgtgaagaaaattggtggtgcttgtgccttcaaggagaaagacggccctggccgggaaagaagccacctgggtagtagacgtgcaaaatggcaaaggctcacgctccattaattcagacaagaaggccgactgcgcgtttaccatgggtgacactgacttactggatttaatgactggaaagatgaatccttactctgctttctttcaaggcaaatagaagattactggtcatatgggtctggccatgaaattacacagccttcaactgcaccctggcaaagctaaactctgaacaccttggagtcgacttctgcacaatatcaaaattctgtgtacatacgtggctatagtgcggggtgtgtgcatgtgcatgcacgcatgcacagacatgcgtacatgcacacatgtgcccacacacatacatgtgtgtctgtgtccttcccacctgaagctagccacaaatggctcgacatggtatcattggccttggctttctgaagctctgaattaacagagctagataatgcttctgtggtcttgctgaatcacatacaactgcattgaagagttaatggggtaatcatagtctgggcaagattgcgcaaaatcaaagactcactagacaaaagatctcatgctgcttataaatggattgag

SEQ ID NO: 98 - protein, 130 aa, Macropus eugenii
  misc_feature (67)..(67): Xaa can be any naturally occurring amino acid
  misc_feature (106)..(106): Xaa can be any naturally occurring amino acid
FKEIENKLEEGGEQFVKKIGGACAFKEKEALAGKEATWVVDVQNGKGSRSINSDKKADCAFTMGDTXLTGFNDWKDESLLCFLSRQIEDYWSYGSGHEITQPSTAXLAKLNSEHLGVDFCTISKFCVHTW

SEQ ID NO: 99 - DNA, 712 bp, Macropus eugenii
  misc_feature (707)..(707): n is a, c, g, or t
gtccaaatgagcttgtttggggacgaggggtgtggggcagagaagggatgtcgaggggtgatctagagagaaatgggcagagatgacccaagacataggagcagaccaagagaggtgggggaacagatactatgtggctgaactccctcttggctgccctgcttctggcaggcccaggaaccttctgtgctcggagtggccgaagtcgccgagagttggcaccaggtttacactccaggggcatccgggatgcaggtggctcctactgccaggcacgagatctctgctgtgtaggccgggaggatgactgcaccatgccctacctgggcaccctctgctactgtgacctcttctgtaatcgcacagtctctgactgttgccctgacttttgggacttctgcctgggcatcccaccccccttccctcttatccaagggtgtatgtatcagggacgagtatacccaacccttgggacctaccaagacaattgtaaccgatgcacctgcaaagaggatgggacatgggagtgtgaccaggaggcctgcctggtgaacccggacctgatcaatgccatcaaccttggcaactatgggtggacagctgggaaccacagtgccttctgggggatgactcttgatgaagggatccggtaccgtctgggcacggtccgacccacttcctctgtgatgaacatgaatgagatgcanatggt

SEQ ID NO: 100 - protein, 194 aa, Macropus eugenii
  misc_feature (192)..(192): Xaa can be any naturally occurring amino acid
MWLNSLLAALLLAGPGTFCARSGRSRRELAPGLHSRGIRDAGGSYCQARDLCCVGREDDCTMPYLGTLCYCDLFCNRTVSDCCPDFWDFCLGIPPPFPLIQGCMYQGRVYPTLGTYQDNCNRCTCKEDGTWECDQEACLVNPDLINAINLGNYGWTAGNHSAFWGMTLDEGIRYRLGTVRPTSSVMNMNEMXMV

SEQ ID NO: 101 - DNA, 717 bp, Macropus eugenii
  misc_feature (603)..(603): n is a, c, g, or t
  misc_feature (706)..(706): n is a, c, g, or t
cgcgagtgcggagggctatggagctgggtcccgggcaggggcccgtgctgctgctgctcttgctctggatggggccgcgccccttcgcccacgctgggaaaatgaaagtcgtggaggagccgaacacgttcgggttgaataaccccttcttacctcagaccagtcgattacaggccaagagagacccatcagcagcctcaggtcctgcacatctcttcagactttctggcaagtgcttcagtttagtggaatctatgtacaagtatgaattctgtcccttccacaacgtcacacagcatgaacagactttccgttggaatgcctacagtggaattctggggatttgggatgaatgggaaattttcaacaatacatttactggcatgtggatgagagatggagattcctgtgggtctaagaacaggcagacaaaggtggaccttgcctgtggaaaaagtcataaactggcccgagtgtctgaaccaagtacttgtgtttattctctgacctttgagacacctctggtttgccacccacatgctttgttagtgtatccaaccttgccagaaaacctacagcacaagtgggatcaagcagagcagnctcttgttgatgaattaattaccccccagggatatgataagctactcaaagaggtgttggaagaagcagggctatttaaagccttaacagaaaaggaggctgnacacacagagg

SEQ ID NO: 102 - protein, 239 aa, Macropus eugenii
  misc_feature (201)..(201): Xaa can be any naturally occurring amino acid
  misc_feature (235)..(235): Xaa can be any naturally occurring amino acid
  misc_feature (239)..(239): Xaa can be any naturally occurring amino acid
ASAEGYGAGSRAGARAAAALALDGAAPLRPRWENESRGGANTFGLNNPFLPQTSRLQAKRDPSAASGPAHLFRLSGKCFSLVESMYKYEFCPFHNVTQHEQTFRWNAYSGILGIWDEWEIFNNTFTGMWMRDGDSCGSKNRQTKVDLACGKSHKLARVSEPSTCVYSLTFETPLVCHPHALLVYPTLPENLQHKWDQAEQXLVDELITPQGYDKLLKEVLEEAGLFKALTEKEAXHTEX

SEQ ID NO: 103 - DNA, 706 bp, Macropus eugenii
  misc_feature (614)..(614): n is a, c, g, or t
  misc_feature (649)..(650): n is a, c, g, or t
  misc_feature (699)..(699): n is a, c, g, or t
cgcgggcctcggccgctctctgggctggttgtccagggctgtacccctcctcctggctctgagcacgggaagggccccggcgctgcccgaggtatgcaaatattgtccagggcctgtacatgacacatcagaggttgaccattactgtaatctgacacaagaattaaaactgagagcacgttgctgtctgaccgcacagggcaccattgtgggactagatcttcagaattgttccctgaaagaactggacccactctttgctgaggcacattctgccattgttctggacctacaagcaaaccctctcctgaatatatctacctcagtctttcgtaacttcacagagctccagacgctggtactgccactgaaagttgactgtcctggaggatattatgcctgggaaaatatcacctgtggcaccgacagctgtacctgccacaagcaaagaaatcagtgcaataacactgtggagtcagctttgtgcccagagaatgcatattgcgtccctgatggcccaggcctcttccagtgtctttgtactagtggcttccatggctacaagtgtcttcgtgagggctctttccctctcctcatgttctctggagtgctgngcactaccacattttgcatctccatcttgctctgnngaacccagcttcgaaaaatcaaagcctcttgaatcaagttttccttcgnacctaca

SEQ ID NO: 104 - protein, 226 aa, Macropus eugenii
  misc_feature (205)..(205): Xaa can be any naturally occurring amino acid
  misc_feature (216)..(217): Xaa can be any naturally occurring amino acid
AGLGRSLGWLSRAVPLLLALSTGRAPALPEVCKYCPGPVHDTSEVDHYCNLTQELKLRARCCLTAQGTIVGLDLQNCSLKELDPLFAEAHSAIVLDLQANPLLNISTSVFRNFTELQTLVLPLKVDCPGGYYAWENITCGTDSCTCHKQRNQCNNTVESALCPENAYCVPDGPGLFQCLCTSGFHGYKCLREGSFPLLMFSGVLXTTTFCISILLXXTQLRKIKAS

SEQ ID NO: 105 - DNA, 725 bp, Macropus eugenii
  misc_feature (721)..(721): n is a, c, g, or t
ctgaactaggaccctgactttgaaattcttatttcatccctcagccccttcttcagcctctactttgtgtatttcctgataactccctggcttgacctctccatcagcctgtccaccaggcttcattccctctacttatgtgctttgattactgaggggccacgatgcagactcagagtccccagtcaccctgagcctccttcccctcaccactccccatccttgccctggctgtctgcccctctgccctccagtcaagaaccctattgaagcaagcgtgctgctggccgaggcctcactggcccggaagcagcgcaagacccatgctaccttcatcccactgatgctgagtgagatgccacaggccggggacctggtgggcctggatgctgaatttgtcacccttaatgaggaggaggcagagttgcgtagtgatggcaccaagtccaccatcaaaccaagccagatgtcagtggctagaatcacctgtgtccggggccaagggccaaatgaaggtgttcccttcattgatgactacatctctacacaggagcaggtggtggattacttaccccagtactcacggataaagcctggagaccttgatgctaagatttactctaagcaccttaccactctgaagtctacctatttgaagcttcgctttcttatagatattgccgtcaaatttgcgggcgatggactacagaaggacttaccngcca

SEQ ID NO: 106 - protein, 241 aa, Macropus eugenii
  misc_feature (241)..(241): Xaa can be any naturally occurring amino acid
ELDPDFEILISSLSPFFSLYFVYFLITPWLDLSISLSTRLHSLYLCALITEGPDADSESPVTLSLLPLTTPHPCPGCLPLCPPVKNPIEASVLLAEASLARKQRKTHATFIPLMLSEMPQAGDLVGLDAEFVTLNEEEAELRSDGTKSTIKPSQMSVARITCVRGQGPNEGVPFIDDYISTQEQVVDYLPQYSRIKPGDLDAKIYSKHLTTLKSTYLKLRFLIDIAVKFAGDGLQKDLPAX

SEQ ID NO: 107 - DNA, 706 bp, Macropus eugenii
gcggaatttgggtgggagaatactgagttcgggcactcaaatcttacggctgtggtgccgaggcgcgcagacatttcagaggttggtctattctgcctccaggtcaaaaccaactagtgactaaggatgagtcttcagtggactgcggttgctaccttcctctatgcagaggtctttgctgtgctgctgctctgcattcctttcatttctcccaaaagatggcagaagatctttaagtcccgcctggtgcaactggtggtgagctatggcaacaccttctttgtggttctcattgttatcctggtgctgcttctcattgatgctgtgcgggagattaggaagtacgatgacgtgacagagaaggtgaatctccagaataaccctggggccatggaacacttccacatgaagttgtttcgcgcccagaggaacctccacatcgctggcttctctctgctgctgtctttcctgctcagacgcctggtgacccttatctcccagcaggccacactgttggcctccaatgaagccttcaaaaaacaggctgagggtgccagcgaagccgccaagaaatacatagaagaaaatgacaagctgaagaaggaagctggcaccaatggtggtaaattggacctgaatgatgatgtcctagcggagaacaaaaacctgaaggctgaactcaagaaactcacggaggagctggact

SEQ ID NO: 108 - protein, 194 aa, Macropus eugenii
  misc_feature (194)..(194): Xaa can be any naturally occurring amino acid
MSLQWTAVATFLYAEVFAVLLLCIPFISPKRWQKIFKSRLVQLVVSYGNTFFVVLIVILVLLLIDAVREIRKYDDVTEKVNLQNNPGAMEHFHMKLFRAQRNLHIAGFSLLLSFLLRRLVTLISQQATLLASNEAFKKQAEGASEAAKKYIEENDKLKKEAGTNGGKLDLNDDVLAENKNLKAELKKLTEELDX

SEQ ID NO: 109 - DNA, 708 bp, Macropus eugenii
gggacagtgaggctctctccagactcgctgtggaaggcgaggatagtactgggctctcctcctcctcctcctctttctcctcttcttcgtcccggagctcagctccatctccggcaagacgctggcgactcacggcttcgcggtggccatggcggccatggcggccatccctccgcagaggtaccactacttcttagtgctggacttcgaggctacctgtgacaagccacagatccatcctcaggaaatcatcgaattccccattctgaagctaaatggtcagacaatggaaattgagtccacgtttcacatgtatgtgcagccagctgtccaccctcagctgacacccttctgtacagagctgaccgggatcatccaaggcatggtggatggccagccgagtctccagcaagtgcttgagagggtggatgaatggatggcgaaggaaggccttctagaccccagcgtcaaatccatctttgtcacttgtggagactgggacttgaaagtgatgctgcctgggcagtgccagtacctggggttgccagtggctgattacttcaagcagtggattaacctgaaaaaggcttacagctttgccatgggcagctggcccaagaatggactactagacatgaacaaaggcctcaaccttcagcacataggacggcctcacagcggcatcgatgactgtcagaacatcgccaa

SEQ ID NO: 110 - protein, 236 aa, Macropus eugenii
  misc_feature (236)..(236): Xaa can be any naturally occurring amino acid
GTVRLSPDSLWKARKYWALLLLLLFLLFFVPELSSISGKTLATHGFAVAMAAMAAIPPQRYHYFLVLDFEATCDKPQIHPQEIIEFPILKLNGQTMEIESTFHMYVQPAVHPQLTPFCTELTGIIQGMVDGQPSLQQVLERVDEWMAKEGLLDPSVKSIFVTCGDWDLKVMLPGQCQYLGLPVADYFKQWINLKKAYSFAMGSWPKNGLLDMNKGLNLQHIGRPHSGIDDCQNIAX

SEQ ID NO: 111 - DNA, 720 bp, Macropus eugenii
  misc_feature (719)..(719): n is a, c, g, or t
ctcctctcctcctcttggtctcctcttcctatctgtcctttttgggtctcatctggagtgtatctgatgacccttagcagacctgggctgattcatggacttaaaggagcaaatcatccaccatcttgttaccatcgtcttgattgggttctcatattctgccaatcttctgcgcattggtaccttggtgttactgctacacgacatatctgatgttctcatggaggcctgtaaaatatttaattatgcacagcggaggcatatctgtgacacactcttcatcatctttgccctggtgttcatcattagtcggctcattctcttcccaaccaaaatcctctacactacctactatgattccatgattaaattccagcccttctttggatactatttcttcaatgccctcctcatggttcttcaggttctccatgtcttctggtccggcctcatcgtccgtatgatctacaagtttgttttagctggcgggatgcagagtgacataaggagtgacttggaagaacacaacacaagtgacgagcagtccgaggcaccccgacagaagaatgggagtctccagcccagtgacagaacagacaattgtaatctcccccgggctcggggtgctcggggggctgggcccagtcggctggccaatgggcacatcccagcaacatagcctggcacagctcagggccatcagatgatctggctcaggna

SEQ ID NO: 112 - protein, 209 aa, Macropus eugenii
  misc_feature (192)..(192): Xaa can be any naturally occurring amino acid
  misc_feature (209)..(209): Xaa can be any naturally occurring amino acid
MDLKEQIIHHLVTIVLIGFSYSANLLRIGTLVLLLHDISDVLMEACKIFNYAQRRHICDTLFIIFALVFIISRLILFPTKILYTTYYDSMIKFQPFFGYYFFNALLMVLQVLHVFWSGLIVRMIYKFVLAGGMQSDIRSDLEEHNTSDEQSEAPRQKNGSLQPSDRTDNCNLPRARGARGAGPSRLANGHIXSNIAWHSSGPSDDLAQX

SEQ ID NO: 113 - DNA, 729 bp, Macropus eugenii
cggggagctggcatgctgtctctcgccggctgggggtgcccggggagggcgcggctcgcgctctgcctggcggggctcgcgctctccgcttacgcactgcacgtgaaggcggagcgcgcccggagcccggagtaccgcgcctactgcgacgtgggcgagtccatcagctgctcccgcgtcttctcctccccatggagtaagggctttgggctggtggagcccctcctgggtcccgacagcatcctgaaccagtccaacagcatcttcggtcttatcttctacagtcagcagctccttctgggctgctatggtgctccatgggcttcctcggtcctcatgttcagctccctgctttctctcttgggttcagtttatctagcctggatcttgttttttgtgctgtatgacttctgtctggcttgtgtcaccacctatgccatcaatttgggcctggccatactcaactacccggaaggcaatggggcccttggcactacaggatcaaaagaaaaaaggacgctgactctcatgaccctaatggggatcaacaagccctagctgaactctgatctcacccaggagcgcacaccatcacctgctggagtttggcgtgaagcctgcacgatgatggcacaatccatcccaccttcgactgggctctattcactctctgaccttgcacctctcctccttagatatgtaccctacctcccttcggtttcacatgcg

SEQ ID NO: 114 - protein, 184 aa, Macropus eugenii
GELAAVSRRLGVPGEGAAALCLAGLALSAYALHVKAERARSPEYRAYCDVGESISCSRVFSSPWSKGFGLVEPLLGPDSILNQSNSIFGLIFYSQQLLLGCYGAPWASSVLMFSSLLSLLGSVYLAWILFFVLYDFCLACVTTYAINLGLAILNYPEGNGALGTTGSKEKRTLTLMTLMGINKP

SEQ ID NO: 115 - DNA, 727 bp, Macropus eugenii
  misc_feature (641)..(641): n is a, c, g, or t
cccgcttcgcctagcatttcttactctctggccacggtctcctgcctctgcagcctcgtccctctccttccttgccatggagccggccacagacagcgagcatggcagccccccggagcccagtgcactgcagccccccgggggcagctcgcccttagccaccggctcccagtctcacccaggccgagagccgcagcaggaggagcggcatctccgtatcagtgaaagcggccagtttagtgacgggctggaggatagaggtttattagaaagcagcacaagactaaaacctcatgaagctcagaactacagaaaaaaggcattatgggtatcctggttctccatcattgttaccttggcgctggcagtggctgcctttactgtctccgtaatgaggtacagcgcctctgcttttgggtttgcttttgatgccatcttggatgtcttgtcttcggcaattgttctgtggcgctacagcaatgcagcggctgtacactctgcacacagggaatacatagcctgtgtgatcttgggggtgatattccttctgtcatctgtatgtatagtggtcaaagccatccatgaccttttaaccaggctgctcccacaagtggatgattttctgttcagtgtttccattntaagtgggatcctatgcagcgtcttgcctgtgttaaaattatgctgcgaacggttctgacagcagggctctgctacggatggctta

SEQ ID NO: 116 - protein, 156 aa, Macropus eugenii
PLRLAFLTLWPRSPASAASSLSFLAMEPATDSEHGSPPEPSALQPPGGSSPLATGSQSHPGREPQQEERHLRISESGQFSDGLEDRGLLESSTRLKPHEAQNYRKKALWVSWFSIIVTLALAVAAFTVSVMRYSASAFGFAFDAILDVLSSAIVLW

SEQ ID NO: 117 - DNA, 759 bp, Macropus eugenii
  misc_feature (710)..(710): n is a, c, g, or t
cgccaagccccctcctcccttctccattctctcgccatctccatccgatccggccggtcgcgccaagccaagctcggagctcggctccagcccggatccccaccccagtccctgccccctccccgaccccagcccccggccctggtcccccctcagccgctcccatgcgtcgcctgctgccgcttatcctccttcccggactcttcgtcgccttccagcccgactggaacaagctccgcggcttggcccggggcagagtggagacctgcggaggatgacagctgaatcggctgaaggaggtgaaactcttcgtcacccaggacgtcccttactatcacaacctggtgatgaaatacctccctggagccgaccctgaattggtgctgctaggttaccagtatgaggagcttgagagaattcccctccgtgacatgacccgggaggagatcaaccagatgctgaaggatctgggcttctatcggaaacaaagtccggatgcccctgtacctcctgagttccagaatgccccagctaggcccctggaagccaaggcacccaatccagtgccccatggggattcactgcctacacacctggacctctaggcccatggaccatggcccccaccctagctggcagctgtgaaatggtgtgcatgctgtggtccctaacgagttgaggtgccagggccatgcccatgctcccagggnaggtctgcccactgctggaccaccacacacctcacctgcctgcagtgcc

SEQ ID NO: 118 - protein, 146 aa, Macropus eugenii
  misc_feature (30)..(30): Xaa can be any naturally occurring amino acid
MRRLLPLILLPGLFVAFQPDWNKLRGLARXQSGDLRRMKLNRLKEVKLFVTQDVPYYHNLVMKYLPGADPELVLLGYQYEELERIPLRDMTREEINQMLKDLGFYRKQSPDAPVPPEFQNAPARPLEAKAPNPVPHGDSLPTHLDL

SEQ ID NO: 119 - DNA, 759 bp, Macropus eugenii
gagtgagcaatttggaattatctctctttccctatccctccctcattccctctccctctccctctccctctctctctctctctctctctctctctctctctctctctctctctctctctctcacacacacacacacacacacacacacacacatacatacacacacacacacacacacacgcacgcgagccacattttatactggtgccatagacacaccaagttccccaaagagagtgtgtgcgtaaaaatctaaacaaaaattttagttaagcagaacttcgcctaaagctattgatgataaatgcagaagcatcaacatgttccatggcagaaaatcaatagtgggattccatttgcaaagaagtgcagtactttttcaggagataagagtatctgccttggcagctctcctactatgcatgatgagaagaaaacccgtggctctaggaaagccagaagatagaaagaatccctgccaacaccctgatgtcccccacacacataccccagccagagcagggaggtatttctggactgaaagggtcaaaccaattcgaagccacaagcgtggactatggtccacctgagagccccctgggaccacatctgcataaggaatctggcctttcccagagactgaatggccactcgagaaccaaattgcgcacgattatacacaggatacgaaaaacatggagcgacgtcccaaacaggacggaggggatcccacgaagacactcgtaaggaaggctaagg

SEQ ID NO: 120 - protein, 152 aa, Macropus eugenii
  misc_feature (152)..(152): Xaa can be any naturally occurring amino acid
MQKHQHVPWQKINSGIPFAKKCSTFSGDKSICLGSSPTMHDEKKTLALGKPEEERIPANTLMSPTHIPQPEQGGISGLKGSNQFEATSVDYGPPESPLGPHLHKESGLSQRLNGHSENQIAHDYTQDTKNMERRPKQDGGDPTKTLVRKAKX

SEQ ID NO: 121 - DNA, 732 bp, Macropus eugenii
  misc_feature (691)..(691): n is a, c, g, or t
  misc_feature (710)..(710): n is a, c, g, or t
ggacccctctgcatcatcaagggtgcagcagccatctcctgcatcaccaccttctgcttcgacatctacttcaccacctcctccttcattttctcattcttcatcttttgcatttggttcttcagaaggcaagtcaaagcatcctaggacagaccctaaaccccccaaagctgagaaccagagtagccgtcagccctctgaagcagaagaggatctgtacaggagatatgaacaggaacaggccatgatccaagaagagctacttcagctagtgaagagagaaagggaggtgtccagggaacacctgaagtcctcccttccatgggagaagagtgatgtgaaccaggagaagcagagatcagcccaactggccaaggaactggaagttgtagaagcagagctaagacgccgtgacattttctataaagagcaattgggtcgcattgaaagaaagaatgctgaaatgtataaactgtcctcacaacagttccatgaggcagctactcaactggaagacacaataaaacctcgaggggcagaacccgtgtgctcaggcctgcagtcccagatacttcactgctaccgagacaaccttcgggaagtacttaagtgctctgacctggtcaagcctaccacactgcgtgacactgccacaaggctgagagcagagtcattctgcatgagagagccngcagcgcaggcgcactganagagtggccccagatcctggtc

SEQ ID NO: 122 - protein, 244 aa, Macropus eugenii
  misc_feature (236)..(236): Xaa can be any naturally occurring amino acid
  misc_feature (244)..(244): Xaa can be any naturally occurring amino acid
DPSASSRVQQPSPASPPSASTSTSPPPPSFSHSSSFAFGSSEGKSKHPRTDPKPPKAENQSSRQPSEAEEDLYRRYEQEQAMIQEELLQLVKREREVSREHLKSSLPWEKSDVNQEKQRSAQLAKELEVVEAELRRRDIFYKEQLGRIERKNAEMYKLSSQQFHEAATQLEDTIKPRGAEPVCSGLQSQILHCYRDNLREVLKCSDLVKPTTLRDTATRLRAESFCMREPAAQATXRVAPDPGX

SEQ ID NO: 123 - DNA, 768 bp, Macropus eugenii
  misc_feature (636)..(636): n is a, c, g, or t
  misc_feature (639)..(639): n is a, c, g, or t
  misc_feature (668)..(668): n is a, c, g, or t
ctggtagtagcccatgtcagctgaagggatgaaaccccccaacctgggggaagcgtgatgccccattggagccactgagaagtgaattaggagtccactttttgttctttctgaagagtcccctttccacatttttacaccccagtcctgcttccttcagccatttgttccccatcgtgttttaaggtttagtttctcaggtctcaggctgggagcagaaggttctgaaggagccggttgtgatctcccagtcgcagaccatcctgatgctttttgtagcctgtggactgatctccatgggctgtcctaggagacaaggcaaacattaaagctgcaaagcacctgcttctccagaacctcttattcctaaaacgtgggttgcaggcaggtttctggctagaggaaccagaatcatctgggcctcgttggcagaactgaaatggggaagagccctttttctttggatcaggtgtcccagccctttattctttctgcatagcagggcatgtgtgttttgttctgttctgttttttggtattaggcagctatttttcaggtgaggagagtcaggagctggtttcagctctatgttgaattgtttcaggaggcgtgcttagacctctccttggaggtctntangcagaatagggattcttggattattgtangcatgtacctagattggggggtggctgggaaccctgcttgctagtatgggggatgtgtgatcacagctgtgccctcagaacccatcctactatgcaccac

SEQ ID NO: 124 - protein, 58 aa, Macropus eugenii
MGNKWLKEAGLGCKNVERGLFRKNKKWTPNSLLSGSNGASRFPQVGGFIPSADMGYYQ

SEQ ID NO: 125 - DNA, 765 bp, Macropus eugenii
  misc_feature (639)..(639): n is a, c, g, or t
  misc_feature (730)..(730): n is a, c, g, or t
cacgggccaagatggcggcggcggtcggagtctccttgaaacgcagtcttgtcccgggggtcgctctgcttcccgggctccgggtacaggcatgccgaggggcccagacagcagctgctgcagctccccgcatcaagaaatttgccatctacagatgggacccagataagcctggagaaaagccccgaatgcagacttatgaaatcgatctgaacaaatgtggcccgatggtgttagatgccttgatcaagataaaaaatgagatggatgccacgctgaccttccgaagatcatgccgagaaggcatctgtggttcctgtgcaatgaatatcaatgggggcaacacgctggcctgcaccagaagaatcgaccccaacctcagcaaagtctccaaaatctaccctcttcctcatatgtatgtgatgaaggatctcatcccggatctgaataacttctatgctcaatataaatccattcagccttatttgaagaagaaggatgaatccaagggagggaaggaacagtatattcagtccatagaagatcgagagaagctggatgggctgtacgagtgcattctctgtgcctgctgcagcaccagctgccctagttactggtggaatggagacaagtacttgngacccgccgtcctcatgcaggcctatcgctggatgattgactccagggacgacttcacagaggagcggctggcccagctacaggacccatnctctttgtaccggtgtcacaccatcatgaactgta

SEQ ID NO: 126 - protein, 252 aa, Macropus eugenii
  misc_feature (210)..(210): Xaa can be any naturally occurring amino acid
  misc_feature (240)..(240): Xaa can be any naturally occurring amino acid
  misc_feature (252)..(252): Xaa can be any naturally occurring amino acid
MAAAVGVSLKRSLVPGVALLPGLRVQACRGAQTAAAAAPRIKKFAIYRWDPDKPGEKPRMQTYEIDLNKCGPMVLDALIKIKNEMDATLTFRRSCREGICGSCAMNINGGNTLACTRRIDPNLSKVSKIYPLPHMYVMKDLIPDLNNFYAQYKSIQPYLKKKDESKGGKEQYIQSIEDREKLDGLYECILCACCSTSCPSYWWNGDKYLXPAVLMQAYRWMIDSRDDFTEERLAQLQDPXSLYRCHTIMNCX

SEQ ID NO: 127 - DNA, 766 bp, Macropus eugenii
  misc_feature (697)..(697): n is a, c, g, or t
  misc_feature (738)..(738): n is a, c, g, or t
tgtttgttttttttttttaacctgtattcctccttaacttagagtaaggaaggttatattctttgctttggggaatccttttctctgtcctcccttccctcacctttttccaaattctgggcacaatagcggctgtactctctcttctgtggcaggtgtgcatcctattggctggctggtacttcctggttgttttataatggggaggagggataaaatgtgtgtatcggggacatgctatgatgtaatgtttcttgttttataatggataattaactgcaaaactgttgtttgaactgtaatgtgtttgagttattgctgaatatagtatttttctaatataatgaatgaaaatgaaatctagcattcctataacaatgtgtctatgtttgtctgtttgtgtctgtttaatagtagttaatatctgtggtccatacctggaagaggaagtacagatttaaaggaataacaaaagactttgtgtcttagacccttcgcaggtgttacagtcgggtgaaagaacatggtgttgggaaaagaaagagcagttacacatttgaacagttggaacaggtgtttggtcagggaggatgggatgctcagccctgccagcctgtacttattaacagtagtggcttgtaccaggagctggagtcagatggcagcactatggaggattattcacaggaggactggngaaaccacagtcaggatctacatggctatccaacagatcangaattgggatgaatgcctgtcacaagaa

SEQ ID NO: 128 - protein, 82 aa, Macropus eugenii
  misc_feature (11)..(11): Xaa can be any naturally occurring amino acid
  misc_feature (59)..(59): Xaa can be any naturally occurring amino acid
  misc_feature (72)..(72): Xaa can be any naturally occurring amino acid
  misc_feature (76)..(76): Xaa can be any naturally occurring amino acid
  misc_feature (82)..(82): Xaa can be any naturally occurring amino acid
MVLGKERAVTXFEQLEQVFGQGGWDAQPCQPVLINSSGLYQELESDGSTMEDYSQEDWXNHSQDLHGYPTDXELGXMPVTRX

SEQ ID NO: 129 - DNA, 750 bp, Macropus eugenii
  misc_feature (638)..(638): n is a, c, g, or t
  misc_feature (648)..(648): n is a, c, g, or t
ttcagttgctactgcagacacagagactatccccagaaaaatgaagcttctgttgctgagtatgggcttggccctggtctgtggcttccaacctgagtatagcagatcagaggaagacctgtcagatgaaaaggaacaaaaatggctttctggacactgggacactgttgtattggcctcaagtgatatatctctgattcaggaggaaggtccttttaggacttttgtccaaaatatcactgtagaaaatggaaacttgaatggattcctttggacaaggaaaaatggccgatgcattccattatatcttactgctttcaagactacagaggcatggcattttaagatggactattatggaactaatgatgtctactatgaaagctcgaagccaaatgaatatgccacaatcatcttgtataactaccacgatgggaaagtgaacattgtgtcacaactctttgggcggactccatatctgagcaacgaaatcaagaaaagatttgaggaagattttataaacagaggatttaggagggaaaacattttagacgtttctgaagttgatcattgctaggagcttgaccaataaggaagctgactctgtccttcagggattcccaggagactaatctttntcttgctggngctcccacctgctttcaccaagaattatcagcatgataatcacaagttctggaggcctctttgcctcttctccagcttcaggcgattctgttctagagtctg

SEQ ID NO: 130 - protein, 250 aa, Macropus eugenii
  misc_feature (209)..(209): Xaa can be any naturally occurring amino acid
  misc_feature (213)..(213): Xaa can be any naturally occurring amino acid
  misc_feature (216)..(216): Xaa can be any naturally occurring amino acid
  misc_feature (250)..(250): Xaa can be any naturally occurring amino acid
SVATADTETIPRKMKLLLLSMGLALVCGFQPEYSRSEEDLSDEKEQKWLSGHWDTVVLASSDISLIQEEGPFRTFVQNITVENGNLNGFLWTRKNGRCIPLYLTAFKTTEAWHFKMDYYGTNDVYYESSKPNEYATIILYNYHDGKVNIVSQLFGRTPYLSNEIKKRFEEDFINRGFRRENILEFLKLIIARSLTNKEADSVLQGFPGXLIFXLLXLPPAFTKNYQHEITSSGGLFASSPASGDSVLESX

SEQ ID NO: 131 - DNA, 754 bp, Macropus eugenii
  misc_feature (627)..(627): n is a, c, g, or t
ttttccctccccttctagacagctcttataggagctgacatggcctcttattcttgcctgaattcagtcatttcccctgtacctcttggggagtggcagtaaatttggatatggtgttgtgaaatgggggcccaagctagattttgaagggatggatgatgtcacagaggtgagcaactatgtaaatcatccctaagtgccaaagagagtggttcaggggacaggtttttacctgtgccttctctgctcatgtagggcctcattggtgaggaaagggagggattgtcaggatatctcattccctcttgcacagttcttcctagctgaccaccaagtggaggcaaagagttttctctacctccttaggtttttagcctaagaggtaataaagatagggacaaatttaaaaggtttagggtatggcagtgggtactggcccctgcactcccaaccctaagtgtgcacattgctaggtctagaggttttgtgtgtgtgtgcatgtgtgcatgtgtgtgtttgggcccctggtcttcagcagtctactctatgttctttctccagtatgtgtctggtttcttaacagtagggcagttcccccatcctaggggggtggggagaagtggtcangcagcagcagcagcaaactcatttctggtagaagctgttggctagggctcttgtatttgtgccaaatcccaagtgccatttgtatggaggctacatgtgccccattactatcttcccaccccgagaa

SEQ ID NO: 132 - protein, 51 aa, Macropus eugenii
MASYSCLNSVISPDLLGSGSKFGYGVVKWGPKLDFEGMDDVTEVSNYVNHP

SEQ ID NO: 133 - DNA, 769 bp, Macropus eugenii
  misc_feature (502)..(502): n is a, c, g, or t
  misc_feature (564)..(564): n is a, c, g, or t
  misc_feature (621)..(621): n is a, c, g, or t
  misc_feature (632)..(632): n is a, c, g, or t
  misc_feature (642)..(642): n is a, c, g, or t
  misc_feature (644)..(644): n is a, c, g, or t
  misc_feature (647)..(647): n is a, c, g, or t
  misc_feature (653)..(653): n is a, c, g, or t
  misc_feature (668)..(668): n is a, c, g, or t
cgcagaacccagcgtaggaagtcgggcatcacttccctgctctttggggacgaggaccttgaggctttgaaggccaagaacataaagcagacggagctggtggctgacctgcgtgaagccatcctgcaggtggcccgccactttcagtgtgtggaccccaaaaacggcagtgtggtgagtgggggaagggtgggaaagacccagtgttagcggcctcacttttcccagggagcccagggcactgcctgcctcctgcgagtgggctgaggttggctgggtccagaccccctacccggtgccttgaggtctacaggagcctcaagcctgtgcctggtgacggggtcagagcctgagcaggagcccctcctcctggaccttagcccagcacctggcacctagtaggtgcttaggtttgttgacttgccagctgatctcagtgagaagacaactcccaggtgatgaatctccttccaccagctgatgggcttagtggattgcctgngatgtgcaggtctcatgccagcacaggtcaagagggtcttgaccatgtctgtgacccattgnggctgccacttctttgtggcctttccaagtaggcttatctgaagaagcctctggcangtgggggtggngtgggggggnanaantgcaanggatgaagcactggnggggtttgggccgtgacttccccacccccttttggggggctctgaacaggagctgaccccagactataccatggaaagccaccagcgggaccatgaaaact

SEQ ID NO: 134 - protein, 69 aa, Macropus eugenii
RRTQRRKSGITSLLFGDEDLEALKAKNIKQTELVADLREAILQVARHFQCVDPKNGSVVSGGRVGKTQC

SEQ ID NO: 135 - DNA, 762 bp, Macropus eugenii
  misc_feature (632)..(632): n is a, c, g, or t
  misc_feature (667)..(667): n is a, c, g, or t
  misc_feature (694)..(694): n is a, c, g, or t
  misc_feature (708)..(708): n is a, c, g, or t
  misc_feature (711)..(711): n is a, c, g, or t
ctctaagattagttacttttagtgaaatagtcattatttcatctttattattgatactactagcagcattattaatattttattatttaatgataattaacatttattatatcataatgggatctaataggtatatatcattttcagtttttccaagttatttgcatatattatctcctttaacatcctccttattatagaaatcttgatcctaaaaacttaaaaaatgaaagaaaatacaaaataccaaaggctcattcaattcaaacaaatattaactgagtacctattacataccagaactagagaatatggctttcctagttcttcctcaaaatggtggacactggggacacagaggcaaaaaccaaaatgtctcctgcttgcattctcctgctaaagctggttgccaaggagttactctaggacatcgactactcagtaattacagaggattgtcaatcttcattggtggatccaagtatccacactgacacaatcatcccagtttgcttttaagtacaacacagcctaggattgtttcctattaaaacccaaaggaagatgatgtcttaagggacagagtatttgtctaaattttcattgctggaacggagcaggctagctatcanaagtcattgttgatcagattcaaggctttatgagnttaaatcttgtaaaggtcaagctctgntagtcatggtacanagntaagtttaatgttctatgaattgaccttctctgagtgtctagttaaagtct

SEQ ID NO: 136 - protein, 60 aa, Macropus eugenii
MAFLVLPQNGGHWGHRGKNQNVSCLHSPAKAGCQGVTLGHRLLSNYRGLSIFIGGSKYPH

SEQ ID NO: 137 - DNA, 766 bp, Macropus eugenii
  misc_feature (547)..(547): n is a, c, g, or t
  misc_feature (667)..(667): n is a, c, g, or t
  misc_feature (672)..(672): n is a, c, g, or t
  misc_feature (757)..(757): n is a, c, g, or t
ggaaagttttttcaggcagccaaatgaaggttattactttaaaagacaatcggaaggaggcaaacataaggagaaatgagctaattttaaaagaaggttgagctaaattaggaaaaactctttgaaagagtcaggataggaatcttattaggtctaaattttaagccgagatagatgcctttctcctttaggacagaactggccctatttgagcttcgtaataggattgacagaaaagagagctttgtcctgtaatatacgccagtagaagggccaaagagcgagcctcgggagccttagcagatggcaaatttgacccccctccccccccaaaaaaaggctaagctgaaaataatagaaaatgaaaggaaactaatacggaaaaagtaactaaaaaagcctttaaaatggctgaagctgctattagatggaggagagagagccagacagctgtgagaaaactagcatcagaaaaaagcaggaaactgcagaaatagattcacgtacagcgagggggaaggaggaggggaaacggccagagaacgtntagaagaaaaaaaggcgaaaataacgaagaattgaaagagggaaaatagaaattgaagaaatagcaagattggaagaggaagatagaagtcaggaaataacatttttgaagaaaaattangaatntgaaaagtagacagttttgaagaaggggaaagaatttagaaatagggagaaaagcttttgagaaacagatttagagaaaatagcnaatgaacat

SEQ ID NO: 138 - protein, 80 aa, Macropus eugenii
  misc_feature (26)..(26): Xaa can be any naturally occurring amino acid
  misc_feature (41)..(41): Xaa can be any naturally occurring amino acid
  misc_feature (80)..(80): Xaa can be any naturally occurring amino acid
MEEREPDSCEKTSIRKKQETAEIDSXYSEGEGGGETARERXEEKKAKIRRIERGKIEIEEIARLEEEDRSQEITFLKKNX

SEQ ID NO: 139 - DNA, 749 bp, Macropus eugenii
  misc_feature (625)..(625): n is a, c, g, or t
  misc_feature (657)..(657): n is a, c, g, or t
ctccagacttgatcaactaaattgtggcacccagcttttaccccaaatctctgctcgttccttactatcctcagcattccttccttcctgtgcttctcctctcctcccttactcccctcccccccccaaaaaagctggtctcttagaaatttttgaagttattgtttctttatcaagtagtctgccttacctccaccagatgttcaacaatcaccaattttatgactgtcttggctttctgtgaaggtgaatagtttagtggaatagcaccttctgcagaagcagtagagggagaaggtaacagaaagggaaagggggtactgctgtcatcacagttctaaggacccataaccttaccaggcaaaaaacccttgtgtggtgatgtcagatttttccactccctgacctgataaaattccacccccacaatgcaaaggaggaactttgagttccctgtatgctgaaaacactacccagcaaaagaagaggtgtctttacttcaggactagggttaggaatactaagttttttctgggactaaacccagaatgaccatccaaaaggaaagaagcaatctgttcccaagagctggattttgccatgttcttctctaagtgggacctgnatggtaccccaccatagcagagagatggactnctttagctgctaagctcaagaggagagaggataagtccatgttgaggcactcccagaaatccaagcaggtgccccatccagttctttctctg

SEQ ID NO: 140 - protein, 67 aa, Macropus eugenii
  misc_feature (26)..(26): Xaa can be any naturally occurring amino acid
  misc_feature (31)..(31): Xaa can be any naturally occurring amino acid
  misc_feature (37)..(37): Xaa can be any naturally occurring amino acid
MTIQKEEAICSQELDFAMFFSKWDLXGTPPXAERWTXLAAKLKRREDKSMLRHSQKSKQVPHPVLSL

SEQ ID NO: 141 - DNA, 759 bp, Macropus eugenii
  misc_feature (708)..(708): n is a, c, g, or t
  misc_feature (754)..(754): n is a, c, g, or t
ctgttgccttgtaagagttaaaatgatgccaaggagaaaatcataagctgtctaagaaagcaataaaccaagcaaccaaccaaccaatcaactaagaaaccaacatgtgcaactcttttccttgtggttccagccagaattaacagtgaaaagttggataaaaacatcttagcaaattgtggattttgtgagattcatcattaaagaatttcgaatatgaccattttggaattgcagggaaaagctcctgagactttagcaataattccaagtgctcagcccctgctaaaacacctctgcacagtccctatcactcagtatttcccattccctccccagtgttgggagtgaatctcagtatggggagtgtagcagccactgggttcttgtaacagtcccccatggtattaagagatgagaatcctgggcaattgtaggagaaccttaattcatccttccccacctgggtaaaggaggggagggtcaataagcacagattggaagtggctttaatgaccctgtgcccctgaacaccctgtcacccacccctctaggcagaggttgggagtatcttccagttgcaataagttctgcccagcctgccacaacagcttcaagtagccccaaactcatcaagttctgcagctgtggggtggcagtaggtggattgctgaggcctatggtgaacattccctgagccataccatncaaagttatccgtactggaagggcctaccatcagccactccacctntacgc

SEQ ID NO: 142 - protein, 44 aa, Macropus eugenii
MTILELQGKAPETLAIIPSAQPLLKHLCTVPITQYFPFPPQCWE

SEQ ID NO: 143 - DNA, 746 bp, Macropus eugenii
gtttaggatcattgttggtaagttaacattcattcatagaggaaacctttagttaccagtctacaaaactcttttccccatcctgcaatggtgttcatcttaggccagtttcagaccttatctgctctgctctctcgacccttaacattgtcatctgacctattcaattaagctgctatcctccctgcttcaatggtctttggactcccaggcctttccatctacctaggcaggggacctcaatctttctatctgtatcaccaatgtttggcacataataagtgcttaacaaaacttttttctttcattcattcattcttcatgcacagcttagccttgtgaacaaattcattcaatcccatgcacatggtcaatagaacctcatttagaggtcatgaaatgttgctatgatgctggtcagtgaccgatcccctctgtggcacacctcaagcccagtcagtgctccctgcccattttgcccagcttggccctgggacctgcctcccctcccacccatcttctagcttctcagcccactccgtactccatgccaataatcaccaaagcttccattcataacattgtctctatggcaccaactgcttctactagcattgttgttttcctggacaccttctgtgggtaccctgttgtaggctctgtattctgagccccttttagcttttgggtatttaggaataaagaaagtatgctatgttgatgccctaatccatagagaatcaccc

SEQ ID NO: 144 - protein, 56 aa, Macropus eugenii
VILYGLGHQHSILSLFLNTQKLKGAQNTEPTTGYPQKVSRKTTMLVEAVGAIETML

SEQ ID NO: 145 - DNA, 655 bp, Macropus eugenii
gcaacaccatctccatcttccccaccatgatggtgtgtatgatggcctggcggcccattcaagcacttatggccatttcagccactttcaagatgctggagagttcaagccagaagttcctccagggcttggtctatctcattgggaacctcatggggttggctttagctgtttataagtgccagtccatgggactgctgcctacacatgcatcagactggttggctttcattgagccccctgagagaatggaattcagtggtggtgggctactcttataatcaggggaaaccgcgaattggcaccctctcacccttggatcccatttggttttcgtcatttgtcccttctcaataacacttcagtctgttctgcttcacaaagatctcctgtgctgaaaagaagaatccaaaaacttcttttctcaaaggtgaaaacagaacaaagcttatagggttagagtacaagagtaccaacaaagaaaaactacagagatgctcctggctgaaaataatgtaaaaaactttatttatgtttctaatacagagcaaaaacaacaatcagaaccataattctatgtaaacaagagtggctgcttcagcctctcctctcaataattaaactgctcagaacggctcttgggaaagaaaaaaca

SEQ ID NO: 146 - protein, 189 aa, Macropus eugenii
  misc_feature (81)..(81): Xaa can be any naturally occurring amino acid
NTISIFPTMMVCMMAWRPIQALMAISATFKMLESSSQKFLQGLVYLIGNLMGLALAVYKCQSMGLLPTHASDWLAFIEPPXENGIQWWWATLIIRGNRELAPSHPWIPFGFRHLSLLNNTSVCSASQRSPVLKRRIQKLLFSKVKTEKAYRVRVQEYQQRKTTEMLLAENNVKNFIYVSNTEQKQQSEP

SEQ ID NO: 147 - DNA, 750 bp, Macropus eugenii
cgtgaaggtcggtgggtacttgtggctggcgggctcgcggttgtgagtggggccagggaggcatggattcctcttcgtccattgcagggctgggctccgtggacccgcaactgcagcatttcatcgaggtggaaacccagaagcagcgatttcagcagttggtgcaccaaatgactgaactgtgctgggaaaagtgcatggacaagcctggacccaaattggacagtcgagcagaatcctgttttgtgaactgcgtggagcgattcattgacacaagccagttcatcctgaaccgactggagcagacacagaagtccagaccagccttctccgaaagcttgtctgactgatctcagcacaattctctctgttccattttcaaaagaactttatggttcaagaaaagaagaactgatgggatggttgtaaaagaaaaggctgtggggagattgacttacatcttttattccagtcttttgggttgtgctgtcatctgaatgagcaaagaacagttgtgtgagtgtgggggttgtgtcttgttttgaaatgccagttttatgaaaattttggacatttgaagactaccagatacatttaaactgtacacagggctatgttctttacgcttcattggcttctttgtaggtattaaactgggacccataagtagactccctcatctgtacatgctaattccaaactcgtgggagggtgggattgaggtaatatatcacatcttggaacaggagt

SEQ ID NO: 148 - protein, 121 aa, Macropus eugenii
MDSSSSIAGLGSVDPQLQHFIEVETQKQRFQQLVHQMTELCWEKCMDKPGPKLDSRAESCFVNCVERFIDTSQFILNRLEQTQKSRPAFSKACLTDLSTILSVPFSKELYGSRKEELMGWL

SEQ ID NO: 149 - DNA, 758 bp, Macropus eugenii
  misc_feature (662)..(662): n is a, c, g, or t
ctctgactgtgaagataatacttccagaaggggctaagaacattcaagtggacagtccttatgagattagccgagccccagatgagttacactatacctacctggatacgtttggccgcacagtgattgttgcccataagaacaacttggtggagcaacatatccaagacattgtggtacattacacattcaacaagattctcatgttgcaagaacccctattggtggttgcagccttttatatcttgttctttacagtgatcatctatgtgaggctggacttttcaatcacaaaggatccagctgctgaagccaggatgaaggtggcttgcatcactgagcaggttttaactctggtcaacaagagattaggtctgtaccgtcactttgatgaagctgtcaacaagtacaagcaatcacgcgatgtgtccactctcaacagtggcaagaagaccttggaaatggagcataaatccttgactaatgagattgcatctctgcagtccagactgaagactgagggctctgatctttgtgacaaagtcagtgatgtccagaaactagacagtcaggtgaaagatcttgtgctgaaatcatcgttggaggctgagcggctggtggctgccaagctcaagacagacgcttatattgagaatgagaanggctcttccagcagacgccaggagctgctcaccaaaattgacaacatcctggatgctctgtaacctgtggcactgcctttgctacctagatgctgg

SEQ ID NO: 150 - protein, 240 aa, Macropus eugenii
  misc_feature (220)..(220): Xaa can be any naturally occurring amino acid
LTVKIILPEGAKNIQVDSPYEISRAPDELHYTYLDTFGRTVIVAHKNNLVEQHIQDIVVHYTFNKILMLQEPLLVVAAFYILFFTVIIYVRLDFSITKDPAAEARMKVACITEQVLTLVNKRLGLYRHFDEAVNKYKQSRDVSTLNSGKKTLEMEHKSLTNEIASLQSRLKTEGSDLCDKVSDVQKLDSQVKDLVLKSSLEAERLVAAKLKTDAYIENEXGSSSRRQELLTKIDNILDAL

SEQ ID NO: 151 - DNA, 767 bp, Macropus eugenii
  misc_feature (628)..(628): n is a, c, g, or t
  misc_feature (642)..(642): n is a, c, g, or t
  misc_feature (646)..(646): n is a, c, g, or t
  misc_feature (661)..(661): n is a, c, g, or t
  misc_feature (711)..(711): n is a, c, g, or t
caggggatcagtgtccccgagtacacgtgcaattccttcctgcaggagccccgggagaaggcagcagcggcagcgacagcagcggcagttgccggagtggccaacagcaaggagccctcggcttgcagcgaccaccccagcccgagcagccagctgaaggaggagaagcagcagcaacagcagcagcaaccacaacagcagcaacttgacccaaataaccctgcagcaaactggatccacgcacgttccaccaggaaaaagcgctgtccctacacaaaataccagaccctggagctggaaaaggaatttctctttaacatgtatctcactcgagaccgccgctacgaagtagctaggattctaaacctcacagaaaggcaggtcaaaatctggtttcaaaaccgaagaatgaaaatgaaaaagatgaacaaggaaaagggcagtaaaggagactaatgccccttggaaatgaattgattttgccaatgcatattatcccttcctttttcagaaactcttcaccgagcaggtctttttaggtagaagtgaaatgttgtctctgtaagctatttttggggggaactcgattattttctctctagtgtgtaaaaaagtgctttgacctttnctttccctcctttncttncgacggatctggttnctcggggaaattgtctattgtgagtgcacgctagctttggggaactctcntatgtgtaaatgtctgacatgtttctgaagtgatgtagtctagatgctcccttcgc

SEQ ID NO: 152 - protein, 151 aa, Macropus eugenii
QGISVPEYTCNSFLQEPREKAAAAATAAAVAGVANSKEPSACSDHPSPSSQLKEEKQQQQQQQPQQQQLDPNNPAANWIHARSTRKKRCPYTKYQTLELEKEFLFNMYLTRDRRYEVARILNLTERQVKIWFQNRRMKMKKMNKEKGSKGD

SEQ ID NO: 153 - DNA, 753 bp, Macropus eugenii
  misc_feature (685)..(685): n is a, c, g, or t
ccggacgcgtctctgtttctgatttaccgggctccagcttggacgtccaacaggctaaatttaacaattcaacaaacaaggtggtatattgggaagtttgctcgagttgaaatcacaggacctgtgttcaaatcttggctccactgcttctgacctatgtgacattgaccaaaccatattaacctgctagtcttcaatttcctcatctgttaaaattttaacagatgaggtggttggatttggggaccaatgaagtcccttccaaccctaaatctacgatccaatggcagcccttagatgcttccacaatgctggagaagacagggagggttgagatctcatctcctgccattccagagcccaaggaaaggagctccttttgaacctctcttaaatttatagaaaacagaggccctgctaggaagctccatgcctcagcacctccagggtagtggcgcagaaccagagtcccattgtgcagcctggagctctggaacaggacacatccaagcaggcccttgacaggaagctggagggaaagtagaactttggaaagtcggccaccacagctgcttcccttagcttctgggccccagtactggagcacccatcccataattctactatatttctaaggagttactacttagtagctgcctgacctccagcagatcatttcccttcntgaacctcagtttcctatttgcaaaatgggtccataagactacactgcttccttccaggcctgtctga

SEQ ID NO: 154 - protein, 157 aa, Macropus eugenii
  misc_feature (23)..(23): Xaa can be any naturally occurring amino acid
QTGLEGSSVVLWTHFANRKLRFXKGNDLLEVRQLLSSNSLENSRIMGWVLQYWGPEAKGSSCGGRLSKVLLSLQLPVKGLLGCVLFQSSRLHNGTLVLRHYPGGAEAWSFLAGPLFSINLREVQKELLSLGSGMAGDEISTLPVFSSIVEASKGCHW

SEQ ID NO: 155 - DNA, 754 bp, Macropus eugenii
ggaatatcttgtgcagagttggtatcttttaagcatcctcatgttgcaaatcctcggcttcagcttccctctccagaagagaagtgtcaacaagttttggaacctccatatgatgaaatgtttgcagctcatttaaggtgtacctatgcagtaggaaaccatgatttcattgaagcatacaaatgccagactgtgatagttcaatctttcctgcgagcatttcaagcccacaaagaagaaaactgggctttgcctattatgtatgctgtagcacttgaccttcgagtttttgctaataatgctgaccaacagttggtgaagaaaggaagaagtaaagttggggatatgttggaaaaagcagctgaattactgatgagctgttttagagtctgtgccagtgatacccgtgctggtatagatgattctaagaagtggggaatgctttttctggtcaatcaactgtttaaaatttattttaagatcaacaagcttcatctttgtaagcccctgattagagcaattgatagctcaaatctgaaagatgactacagcacagctcagagagttacatacaagtactatgttggtcgcaaggcgatgtttgacagtgattttaagcaagctgaagaatatctatcatttgcctttgagcactgtcaccgttcaagtcagaaaaataaaagaatgattctgatatatctgctgccagtaaaaatgctgttgggtcatatgccaacagttgagcttttgaaaa

SEQ ID NO: 156 - protein, 252 aa, Macropus eugenii
  misc_feature (252)..(252): Xaa can be any naturally occurring amino acid
GISCAELVSFKHPHVANPRLQLPSPEEKCQQVLEPPYDEMFAAHLRCTYAVGNHDFIEAYKCQTVIVQSFLRAFQAHKEENWALPIMYAVALDLRVFANNADQQLVKKGRSKVGDMLEKAAELLMSCFRVCASDTRAGIDDSKKWGMLFLVNQLFKIYFKINKLHLCKPLIRAIDSSNLKDDYSTAQRVTYKYYVGRKAMFDSDFKQAEEYLSFAFEHCHRSSQKNKRMILIYLLPVKMLLGHMPTVELLKX

SEQ ID NO: 157 - DNA, 761 bp, Macropus eugenii
  misc_feature (682)..(683): n is a, c, g, or t
cccaggcacagaaaacatcattgcttcatcgagttctgagaagtcctactctcacccagcatggcaaacaagggcccctcctatggcatgagccgggaagtgcagtctaaaatcgagaagaaatatgatgatgagctagaggaacggttggtggagtggattattgtgcagtgtgggtctgatgtgggccgtcctgatcgagggcgactgggcttccaagtctggctgaagaatggtgtgatcctgagcaagctggtgaatagcctgcaccctgatggttccaagccagtgaaggtacctgagaatccacccaccatggtcttcaagcagatggaacaggtggctcagttcctgaaggcagctgaggattatggggtcaccaagactgacatgttccagactgttgacctctttgaaggtaaagacctggcagctgtgcaaaggactctgatggcactaggaagcctggcagtgaccaagaatgatggccattatcgtggagaccccaactggttcatgaagaaagcccaggagcacaagagggaattcacagatagccagctccaggaaggcaagcacgtcatcggcctgcagatgggcagcaataggggagcctcccaggctggcatgacgggctatgggcggccccggcagatcatcagttagagggccaggggcctgnncccttcttgcccccttccttgattcctcggttgcagcaatcctggctcgcctgcctgccccacgtcctgtgcagttcc

SEQ ID NO: 158 - protein, 221 aa, Macropus eugenii
  misc_feature (17)..(17): Xaa can be any naturally occurring amino acid
PGTENIIASSSSEKSYXSPSMANKGPSYGMSREVQSKIEKKYDDELEERLVEWIIVQCGSDVGRPDRGRLGFQVWLKNGVILSKLVNSLHPDGSKPVKVPENPPTMVFKQMEQVAQFLKAAEDYGVTKTDMFQTVDLFEGKDLAAVQRTLMALGSLAVTKNDGHYRGDPNWFMKKAQEHKREFTDSQLQEGKHVIGLQMGSNRGASQAGMTGYGRPRQIIS

SEQ ID NO: 159 - DNA, 776 bp, Macropus eugenii
  misc_feature (533)..(533): n is a, c, g, or t
  misc_feature (571)..(571): n is a, c, g, or t
  misc_feature (596)..(596): n is a, c, g, or t
  misc_feature (607)..(607): n is a, c, g, or t
  misc_feature (702)..(702): n is a, c, g, or t
  misc_feature (717)..(717): n is a, c, g, or t
ggaaatggacctggctacaaggtggtagctggtgaaagggagaatgtttccactgtggactatgctcatgacaactaccaggcccagtcagcagtgcccttgcgccatgaaacccatgggggtgaagatgtggctgtgtttgccaagggtcccatggctcatctcctgcatggcgtccatgaacaaaactacattccacacgtcatggcctacgcagcctgcatcggggctaacaaagaccattgcaaactcccctcatcggccaggctgggcccgcaaccggcactgttctcaggccttctgaccattttcctcctgctcagcctcttattctaaggccagctgtatccaggcccgggacagccagcttaccacccatagctggggcccctttctgacactgcccttgatgctcactgggcctgaagcctcaatccccatcatcagccttgtttccagagcacctcagggcaaaagtcccatgtcaatatggggcagagtggtcaggtggcagtggctgaaggccatatccncactgctgttcatgactagaggcctccatgctccactntgacatccaacttaaggaacttaanggaccccacanacccccccccccccccaaacagtctgaggctcaactggtctccctctggggcatgaactctgggagcacagaattccccatgaggggaagcaggnagtcatgcaggcctngttcatctgtcagctgggtcatgaggcagtttctttcctacactactccagagaaaagt

SEQ ID NO: 160 - protein, 100 aa, Macropus eugenii
GNGPGYKVVAGERENVSTVDYAHDNYQAQSAVPLRHETHGGEDVAVFAKGPMAHLLHGVHEQNYIPHVMAYAACIGAKKTIANSPHRPGWARNRHCSQAF

SEQ ID NO: 161 - DNA, 764 bp, Macropus eugenii
  misc_feature (560)..(560): n is a, c, g, or t
  misc_feature (599)..(599): n is a, c, g, or t
ttgaaactgccagaaacagacactgggacaacattcccgtttcagtattaacacttcttgtcctagtttaaccacatttgccagataaacacttaaaaataaaagcagcaaaccttaatccaacgtataaaaatgtcgttcctgaaagagatcccatggccggcctccctgaaacttaggtggagtttggaaggaaaaaagggaaaatggtggtttgtggagaaatgcagctctttcacattgtggcttaattgtgcataaatacgagatacccctggctgaaccttcgggcccctttggagacagaaaaagcagagtgactttattgtgcttcaccagtgggacgatgaataaagtcgtctgtggctttgaattagatacttgctttcttgttgtttgtcattaaaatagctgtttctaatcactcaaactgaacgtaagggcttcggcagccttccttctgccggaggaaagcagccgtaaatcacacacgattctgtggcaaggtgtgtaacagtgttggcgggaggctgctgctgtttaatgtctctcacacattntagattttatcatgaaggcttttcggaaagggggatcgnaacattccgggttaatcagacagcagattgagctgcacagtcgaacacaccagtgatgtaaatgtgcctgctttgtactttgtaatcttgtcaccattatttgaaacgctgattctgttttctgttctcctctggacttttttttctctttggtggcatgttgcc

SEQ ID NO: 162 - protein, 73 aa, Macropus eugenii
  misc_feature (57)..(57): Xaa can be any naturally occurring amino acid
MSFLKEIPWPASLKLGGVWKEKRENGGLWRNAALSHCGLIVHKYEIPLAEPSGPFGXQKKQSDFIVLHQWDDE

SEQ ID NO: 163 - DNA, 755 bp, Macropus eugenii
  misc_feature (632)..(632): n is a, c, g, or t
  misc_feature (649)..(649): n is a, c, g, or t
  misc_feature (675)..(675): n is a, c, g, or t
  misc_feature (685)..(685): n is a, c, g, or t
  misc_feature (691)..(691): n is a, c, g, or t
gccggatcattatgacacgagtacagaaaatgaactggaaaaatgtttattataaattcttagaaatcacaattagtgaagccaggtgcctggagttgcacatggagattgactggatacccattgcccactccaagccaactggtgggaacgttgttcaatatttattgccaggaggcattcccaaaagcccaggcctttatgctattggctatgaagaatgtattgaaaggccactttcaccccccttggagcaccgtacccaagacgtaggaaaggaaccccgaggagacacagagactctttcatcacaggcctctttacaggtggacatggagtctactcgcattatctattgttaccttgggattgccgagattcggactcttcagcagtgcttgtttttacatttccaagcaaacaccaaaaccttcagtaaagattgggttggtattaatggttttttgtctcagaactgtattgtggaacctggtgtgtcccctaagtccatctatatcaaatttgtggaagtagaaagggactttctttctgctggctctttagtggagtgcctggaaaaagccattggataccccttaaaatttaacaactgatttccatccttcataagngatttggtttttgtctnccttttcccttcgcttatctgcctcntccatacacncactgncatcggactcttcatggaaattttcttttcacagctgggccagtacacctttaagaaatcaagt

SEQ ID NO: 164 - protein, 203 aa, Macropus eugenii
RIIMTRVQKMNWKNVYYKFLEITISEARCLELHMEIDWIPIAHSKPTGGNVVQYLLPGGIPKSPGLYAIGYEECIERPLSPPLEHRTQDVGKEPRGDTETLSSQASLQVDMESTRIIYCYLGIAEIRTLQQCLFLHFQANTKTFSKDWVGINGFLSQNCIVEPGVSPKSIYIKFVEVERDFLSAGSLVECLEKAIGYPLKFNN

SEQ ID NO: 165 - DNA, 757 bp, Macropus eugenii
  misc_feature (621)..(621): n is a, c, g, or t
ttgttatatggaccttcctgttgggaataggaagttgtctcaggtaaccatgacagcaggtatgcggaaagtgggtgtcgtttgttaataagagaatgttgagagctatagctgaaaataggccccttgattatctggcctcaattcatctagatgaattggaacgctataaatgatctcttccaagattcaaggctttgtttgacactaaagctttgtttaaagctagttatctcctagcccattccaaagcaagtacggaacaagaaatggacctagactactttgaaaaatatacttaaactaggcagacaatccctggtataacccattcccacccctggtaacaagagcaaaactggaagttgccacccagtgctgtggacatcgtcttccttccctaggatgacagcttttaaatggaaggggctttgcaaaaagtagaaccctgaaatcacgaatgatctcacagtcattaaagctggccatggggaatgaaaggcactttgtggtgactctggggtccatgttttttagctcttctgctcttgcctctccctccctggcttgggcagatgacctccaatctgaagattgctgtgtctgcctctttcatgtggnggcctgtccttcctcagcatagtggtatgagatttaatttaatagtctcctggatcacactttgctctgcatggaaatgttaggtttcatctacgcctgccctttgtataactctgcagcggctcttgtgtcctgg

SEQ ID NO: 166 - protein, 83 aa, Macropus eugenii
  misc_feature (46)..(46): Xaa can be any naturally occurring amino acid
MTAGMRKVGVFVNKRMLRAIAENRPLDYLASIHLDELEAINDLFQXFKALFDTKALFKASYLLAHSKASTEQEMDLDYFEKYT

SEQ ID NO: 167 - DNA, 773 bp, Macropus eugenii
  misc_feature (579)..(579): n is a, c, g, or t
  misc_feature (678)..(678): n is a, c, g, or t
  misc_feature (710)..(710): n is a, c, g, or t
cacgcagcacgcacgcgcgcccagagccgcctctcccacctcccctccgaggcctctcgggctcgtcggggcctgcgggaggtccccggatgtggtgagcagacgggcttccggccgggcctgagcggaaatggcggcggcggcggcggcggctgcagctgctcccgcagttcggcttcttgccttgtccaggcacactcttgtgtctccctttgtggctagttcactgttgagacgattctaccgaggggacagcccatcagactctcaaaaggatatgcttgaaatccccttacccccatgggaagagcgaacagatgaacccattgaaaccaagagggctcgcctgctttatgagagcagaaaaagaggcatgctggagaactgcatcctgctcagtctctttgccaaggagaatctacagcaaatgacggagaggcagctgaacctctacgaccggctaatcaatgagcccagtaatgactgggatatctactactgggcgacagaagcaaagccagcccccaaggtctttgaaaacgatgtcatggtgatgctgagagactttgctaagaacanaaagaaagagcagaggttgcgggccccagatctcgagtacctctttgagaaaccagcctgagctccattctggcctgacccgcaggcagggccctgcanggacacagtagaccccggtcacctgctgcttnccactaccatcccagagcatggtctcactcacgtcatgtctcagaaaaggactccttgtgtct

SEQ ID NO: 168 - protein, 169 aa, Macropus eugenii
  misc_feature (150)..(150): Xaa can be any naturally occurring amino acid
MAAAAAAAAAAPAVRLLALSRHTLVSPFVASSLLRRFYRGDSPSDSQKDMLEIPLPPWEERTDEPIETKRARLLYESRKRGMLENCILLSLFAKENLQQMTERQLNLYDRLINEPSNDWDIYYWATEAKPAPKVFENDVMVMLRDFAKNXKKEQRLRAPDLEYLFEKPA

SEQ ID NO: 169 - DNA, 749 bp, Macropus eugenii
  misc_feature (623)..(623): n is a, c, g, or t
  misc_feature (630)..(630): n is a, c, g, or t
  misc_feature (655)..(655): n is a, c, g, or t
  misc_feature (707)..(707): n is a, c, g, or t
gattgtaaactaagtcctaatgctttgggtgtttggaagtggattcgtccaagtatttatgatgccagctgtattattatcattagctctttttccttgttagttattaaaggagacagtctcagaacatccaaaaaatccacccccaaacaaaaaccaaaaactgtatgtttaatttgaggaatacagtggccaaacagtacctgattttatccgaaaagacagcccatcttgtgaaagacatgaaatctggaccactgagataaaatatgaattatgccctatggtactagtctgttgtaaattttccttatgtaatgtattttatagttttctaacatttgcatggagcaaaaccaagggtttcctgtggtttgctcacaaccagttcagactgatctgtttgcctgactgaaagtccccaacccccatttgaaagattcttgaagggacatggctcatgagacaaccagactaagtgaacatagagagagaatgactaagaatgttaattaagagagcactggacctttggaaatttctcatatatctatcatcaggctacgctcaaatgacatctcaaaaagtctgattagtttattttctattgagctatctggttnttcttanactatatatatatatatatatacgnatgtgtgtgcctttatatgcatatacatatataatatatatatacacatgtntctccatggatattgatttgtacaaattttaattgcatcatt

SEQ ID NO: 170 - protein, 84 aa, Macropus eugenii
DCKLSPNALGVWKWIRPSIYDASCIIIISSFSLLVIKGDSLRTSKKSTPKQKPKTVCLFEEYSGQTVPDFIRKDSPSCERHEIW

SEQ ID NO: 171 - DNA, 771 bp, Macropus eugenii
  misc_feature (428)..(428): n is a, c, g, or t
  misc_feature (490)..(490): n is a, c, g, or t
  misc_feature (535)..(535): n is a, c, g, or t
  misc_feature (605)..(605): n is a, c, g, or t
  misc_feature (685)..(685): n is a, c, g, or t
tgacaacatggatattcccctggacctttcctcttcagcaggctcaggcaagcggagaagacggggtaacctacccaaagaatctgtacaaattctccgagactggctctatgaacatcggttcaatgcttatccttcagaacaagaaaaagctttactatcccagcaaacacacctatccacactacaggtctgtaactggttcatcaatgcacgccgcaggctcctccctgacatgctgagaaaagatggcaaggatccaaatcactacactatttcccgccgaggggccaagatttctgaagctaactctgtggagtctgccatgggcatcaaaaacttcattccagctttagatgagagctcatttcatgcctgtacaactggaccaaaccagaccttaggaagaccgctgtctcctaagcccncgtccccaggatcgattttggcccggccctcagtgatttgccataccaccgtgactgcattngaagatgcccctttccatctgtgcccatcagtcagtggtggacanacacagatatgcagcagataccagcccaacggttcacagacacctctctcctgtactcagaggacacggntaaaatctggaccaagtgcaaatacccagagtggggctttcaacactctccccccaaccccaccagatctcaaccaagantttagtgaatttcagctccctgcatgatggtgcccttacaggggcagctgggatggaacttccagccaaactgatggcctaccctt

SEQ ID NO: 172 - protein, 257 aa, Macropus eugenii
  misc_feature (143)..(143): Xaa can be any naturally occurring amino acid
  misc_feature (163)..(163): Xaa can be any naturally occurring amino acid
  misc_feature (178)..(178): Xaa can be any naturally occurring amino acid
  misc_feature (202)..(202): Xaa can be any naturally occurring amino acid
  misc_feature (228)..(228): Xaa can be any naturally occurring amino acid
  misc_feature (257)..(257): Xaa can be any naturally occurring amino acid
DNMDIPLDLSSSAGSGKRRRRGNLPKESVQILRDWLYEHRFNAYPSEQEKALLSQQTHLSTLQVCNWFINARRRLLPDMLRKDGKDPNHYTISRRGAKISEANSVESAMGIKNFIPALDESSFHACTTGPNQTLGRPLSPKPXSPGSILARPSVICHTTVTAXEDAPFHLCPSVSGGXTQICSRYQPNGSQTPLSCTQRTRXKSGPSANTQSGAFNTLPPTPPDLNQXFSEFQLPDDGALTGAAGMELPAKLMAYPX

SEQ ID NO: 173 - DNA, 790 bp, Macropus eugenii
  misc_feature (567)..(567): n is a, c, g, or t
  misc_feature (639)..(639): n is a, c, g, or t
  misc_feature (642)..(642): n is a, c, g, or t
  misc_feature (681)..(681): n is a, c, g, or t
  misc_feature (697)..(697): n is a, c, g, or t
  misc_feature (706)..(706): n is a, c, g, or t
  misc_feature (735)..(736): n is a, c, g, or t
ctgtcacatcatccatcagatctcagttgaatcagaccagatttctgaattgaaatacatctctgaatttggaatgatggggcccctggtcactgtcttcttcctgctattgttttcagggaccatagttcttggacataagtaccataaaccagaaaaacagtgtgattctctggtatatgaggatgtagaccggtcagaacccaaacccttattcacaaacaaagccttcttcaatggaaaccttatttaccaatatgatagcgatagccagagggcagtgcctgaaccaggatgggacaatgtgaagaactggaacaatgtgagccagcttcaaaaacaaagaggagattttgcaatggagaacctgcaagaaatcatgaaattcaataaacaagtcaatggttcacacatcttgagtggacattatggctgtacactttgccagaatggtaccactgagggattctggagttatgactatgatgataaactattcattgagttcgacaaagagaaaccagcctggatcccaaagcaacctgcagctgaaataattaaacaganatgggagaaagacccaggtgctgtcaatcgggccaaagcctatctggaaaagacctgtattgatgaactcanaanatatcagcattataagaagactaattagaaataaccggntgggccagatagaggnggactcagncatggagctctatcttaatcccaatcaanngagagatgagaagctgtgaagatcttcaccacccatcaccacagcactatattt

SEQ ID NO: 174 - protein, 250 aa, Macropus eugenii
  misc_feature (189)..(189): Xaa can be any naturally occurring amino acid
  misc_feature (213)..(214): Xaa can be any naturally occurring amino acid
  misc_feature (227)..(227): Xaa can be any naturally occurring amino acid
  misc_feature (232)..(232): Xaa can be any naturally occurring amino acid
  misc_feature (235)..(235): Xaa can be any naturally occurring amino acid
  misc_feature (245)..(245): Xaa can be any naturally occurring amino acid
CHIIHQISVESDQISELKYISEFGMMGPLVTVFFLLLFSGTIVLGHKYHKPEKQCDSLVYEDVDRSEPKPLFTNKAFFNGNLIYQYDSDSQRAVPEPGWDNVKNWNNVSQLQKQRGDFAMENLQEIMKFNKQVNGSHILSGHYGCTLCQNGTTEGFWSYDYDDKLFIEFDKEKPAWIPKQPAAEIIKQXWEKDPGAVNRAKAYLEKTCIDELXXYQHYKKTIRNNRXGQIEXDSXMELYLNPNQXRDEKL

SEQ ID NO: 175 - DNA, 757 bp, Macropus eugenii
  misc_feature (631)..(631): n is a, c, g, or t
  misc_feature (665)..(666): n is a, c, g, or t
  misc_feature (676)..(676): n is a, c, g, or t
cagggaaagttttctttgataatttcgtggaagataatgtctaggctcttttttttttgatcatggctttctagtgacaatttattgcattgtaggcctccttgtcaccagattaaaaattaactgttgcttttttcatagttatttaataaaatggcttttcttaatttgctttaatttataactttttattgaagtttttacatttatttgttgattttaataacaatgtatgttcttttatttaaataaattcttatgcttacattttcaactttctaggtagattatgataatcatgcactttttaaatatggaaaaacaggtaaaaaaaaatctcctgtgcgtattttcaccaatattcctcccagaaaaataattcttccagcagaagaaggatacaggttttgtactgtgtgtcagcgttatgtttctttagagaaccagcactgtgagatctgcaattcatgtacgtctaaggatggcaggaggtggaagcattgccttctttgcaaaaaatgtgtcaagccctcttggattcactgcagcatttgcaattactgtgcccttccaatcattcatgtgcagatgctaaagatggttgctttatatgtggtgaagtagatcacanacgtagtatgtgtcctaatttctctgcatctaannagagctacanggctgtcaggagacagaagccaaaaaaaaagtaaccagattgaaatggagaccactaaaggaccatctatgaatcatgcag

SEQ ID NO: 176 - protein, 92 aa, Macropus eugenii
  misc_feature (50)..(50): Xaa can be any naturally occurring amino acid
  misc_feature (61)..(61): Xaa can be any naturally occurring amino acid
  misc_feature (65)..(65): Xaa can be any naturally occurring amino acid
  misc_feature (92)..(92): Xaa can be any naturally occurring amino acid
MAGGGSIAFFAKNVSSPLGFTAAFAITVPFQSFSADAKDGCFICGEVDHXVVCVLISLHLXRATXLSGDRSQKKSNQIEMETTKGPSMNHAX

SEQ ID NO: 177 - DNA, 762 bp, Macropus eugenii
  misc_feature (654)..(654): n is a, c, g, or t
aaatatgatcggaagctgcacctataaagatatatgtgagacaattgacaccttcattccacctggacagccctgccctgagcctctccatacctatggcctgccctgtcactgcccttttaagaagggtacctactctctgcccaagacgaacttccagatacctcctctgaagctgccacattcccttagcagcggcaactaccgtgctcagatcattttaagcaatgatgaatcacgtctgggctgtttcaacatcaaggtctctctcacagagaaatgagagaccatgacccatgcctggatagagcgctgtggacctctgcttagaataaagagtccagctctagccacttgaattgggccctcccaggatagctacctctctgttcttttgtcttcccacacagtccaggcctctcctttttccccaggcctagggtctatgaacagctaagcaagagcagttcccaggcctcttctcccaagggaaaacccattcaaaggactggcctacttttttagtgttgagagcaagcaccttcttggtagtattttttctcagtttagcataggatcttttaaagtagtaaagtaatgttttaaagtaattatagctaacatttacatagtttgtgaagacttttatatatnatttctcactttaatgatgctcacactcaaacttctcccgatttcccctgcccccagtgccaacctctttggggaggagggtgcggtgactgagtgaatggatctatt

SEQ ID NO: 178 - protein, 93 aa, Macropus eugenii
KYDGSCTYKDICETIDTFIPPGQPCPEPLHTYGLPCHCPFKKGTYSLPKTNFQIPPLKLPHSLSSGNYRAQIILSNDESRLGCFNIKVSLTEK

SEQ ID NO: 179 - DNA, 767 bp, Macropus eugenii
  misc_feature (493)..(493): n is a, c, g, or t
  misc_feature (533)..(533): n is a, c, g, or t
  misc_feature (749)..(749): n is a, c, g, or t
ccagcccctgccgagcaaacccccaagactctgcatccctggtatggcatcacccccacaagcagcccccgcaccaaaaagcggccagctccgcgagcacccagcgcttccccgcttgctctgcaccctgccggtctccctacacctcgactctctcactcagagccgccctcttcgaccccatcaccggccctcagtgtggagagcctgtcctcggagggctcggttctggcccctggggagctggagcccccctcggtgcccaagagttcctctgagcccactgtccacggccctggggcccccgccagcctctcagccacatcttctctctcctcctccgaagagatagcccagccctccctggaccaagcctccgccagcccttctgccagctgtgcccaggtcaccccgggcccacagcctgccaagccctgtgtcggggctgcccccaccccactcctgttagttgcagagaggagccctccatccnctcagctgcaggtgaagtcctcctggcaagagaatccctntaatcgggaagcatcacccatgtcctccccaccgtgaagaaagaccagagaggaggcaagcctgtgcggcccccagcccccggacatgggctccccctcatcaaacgaaagggtccaagctgaccagtacattcccagagaggatctctacggagagatggatgtcattgagccgcagctggaccagctggagcatcgccgggtggccctggaganagactccgcagtgggcaa

SEQ ID NO: 180 - protein, 256 aa, Macropus eugenii
  misc_feature (28)..(28): Xaa can be any naturally occurring amino acid
  misc_feature (165)..(165): Xaa can be any naturally occurring amino acid
  misc_feature (178)..(178): Xaa can be any naturally occurring amino acid
  misc_feature (182)..(182): Xaa can be any naturally occurring amino acid
  misc_feature (250)..(250): Xaa can be any naturally occurring amino acid
  misc_feature (256)..(256): Xaa can be any naturally occurring amino acid
PAPAEQTPKTLHPWYGITPTSSPRTKKXASSASTQRFPACSAPCRSPYTSTLSLRAALFDPITALSVESLSSEGSVLAPGELEPPSVPKSSSEPTVHGPGAPASLSATSSLSSSEEIAQPSLDQASASPSASCAQVTPGPQPAKPCVGAAPTPLLLVAERSPPSXQLQVKSSWQENPXNREXITHVLPTVKKDQRGGKPVRPPAPGHGLPLIKERVQADQYIPREDLYGEMDVIEPQLDQLEHRRVALEXDSAVGX

SEQ ID NO: 181 - DNA, 749 bp, Macropus eugenii
ctctaagggcctactgtggttggtcatgaggctgatgggagaatgaaagggaatctgtggctcagagttggtaggagagtttgttttttcttgccctaagaaatgtccccagtttaggaagaaggtctatcacagagctagcacacctccttaatcagactgtactctggtgcctagggactcaggcttagagagcatgaatatgagatactttgtccagtttctaatggaaacagtcttcctcacatcaactctgcctgcagttgacccttaagtcccagcaggataggggaaagttgaatgggctaaagagaccagctgtgttctcatccccagaggtgcctgttctgaccaagtcagaggcaaactggcatagctgatgactttcagtaccagcttcacaatcctgggaccatggactcatccatctttctgggaacgagctttgcatatgaaactgaaacatcaatgtttaaaagggtgggggtggggaggatgttggtaattctcatccccccccaaccacaaaagatgtcctgctgagtcatgcataaattgacagaagtcactcaatgtagaactccttctgggatgtcatttcattcctaaactgttctgtggtccccatgctgagggaggaagggaaatagaaattcccccctcaccagattaccagtgcagctctaaactacagtgatgcaggcctgcaggcgtttccaaaagcccaaagggcaggggctgtgattggt

SEQ ID NO: 182 - protein, 52 aa, Macropus eugenii
  misc_feature (9)..(9): Xaa can be any naturally occurring amino acid
MDESMVPGXVKLVLKVISYASLPLTWSEQAPLGMRTQLVSLAHSTFPYPAGT

SEQ ID NO: 183 - DNA, 751 bp, Macropus eugenii
  misc_feature (584)..(584): n is a, c, g, or t
ttttgttattgtcatttttgttatttgtcattttcccaacctatttcttgactttgaactttatgttaaaattgggctctcttcacctgggaatggggaacattgtgtcaagctccagattttttcataatgctgtcttcagagttagttctggggatctacaagttttcagtgctttaaagatggtgatgaactaggagaggtgtgatcactgctttccttgtctgtattctggtctttactcacaaaggcccctgctgtcctacagccacaagttctactgcttgtcttagccctggaactgtgaccggaacccttgctctcttccaatcacaaacacccatctctgccctggaactgcttctgagcactagagctgccaatcagtgctagccacatcctgtaccagcaaaggcctcctgtaatctctgatcagttaattatctgaccccctctatcatctctgggctgaacattgctaaagctgctgctgctgcacttatttctaagactcactcctcctgctcctgccacactctggccttgtgcccaccccagtgtcacaggctactcctacagacctnctaagtttttgtaggctggaaaaagcaagattatttgctttttgagacaccttttcaacatatttaaaatacctattattttgctcacattaattctggggctaatcagttaatcatctcaaagaaaagtacccagtgctctgccattaacattggaattttttttt

SEQ ID NO: 184 - protein, 58 aa, Macropus eugenii
  misc_feature (31)..(31): Xaa can be any naturally occurring amino acid
MGVCDWKRARVPVTVPGLRQAVELVAVGQQXAFVSKDQNTDKESSDHTSPSSSPSLKH

SEQ ID NO: 185 - DNA, 769 bp, Macropus eugenii
  misc_feature (611)..(611): n is a, c, g, or t
  misc_feature (661)..(661): n is a, c, g, or t
  misc_feature (689)..(689): n is a, c, g, or t
  misc_feature (720)..(720): n is a, c, g, or t
  misc_feature (732)..(732): n is a, c, g, or t
  misc_feature (741)..(741): n is a, c, g, or t
  misc_feature (761)..(761): n is a, c, g, or t
caagagttcagaaacaaaggacgggtctccaggaaagccttacccaccctacctgctggccagcttctcctgggatgatgtcaacagcaccctagaccacactatgctgagtgccacattccaaggtcgtcctttgaaggatccctccggggccttcaacaatggcagcctggctttcaaggtccgtgctttctcaggtcctggtcgtccagcccatctccctcgactcttgcatacggcagatacctcccagctagaactggttctgtctgggattgtcccacaagggaaccactcccttttcgggctggaggtggcaactccagctttggattctgagtgtccccagctgaaggagcaggaatccatcgatgatgaatattgtccttcagtcttccaggtcagctctcttgggcataggaacccccccaatggattccttctcacctctggtcctagcaatcattgcagtggttctggggggccctgcacttctgctggtaggaggtggcctgagccttctgctactacgacataggcgctattctgagtatgaacgaatcaactgaggtcctgacctcctcccatgtgcctttcacactacggtgaanacaaggatacaccttggagtaaggaagagaagataccatgctttctcttnctctgtttctgggccctggtcttcattntaatgccaatatccctaactcttttcttttntctaacagaccnttcaaaccntcagtctcttcaggtctccnctgggcaa

SEQ ID NO: 186 - protein, 188 aa, Macropus eugenii
KSSETKDGSPGKPYPPYLLASFSWDDVNSTLDHTMLSATFQGRPLKDPSGAFNNGSLAFKVRAFSGPGRPAHLPRLLHTADTSQLELVLSGIVPQGNHSLFGLEVATPALDSECPQLKEQESIDDEIVLQSSRSALLGIGTPPMDSFSPLVLAIIAVVLGGPALLLVGGGLSLLLLRHRRYSEYERIN

SEQ ID NO: 187 - DNA, 761 bp, Macropus eugenii
  misc_feature (708)..(708): n is a, c, g, or t
gttttttgaagagcctgaagatcccagcagtaggtccttcttttcagaaattatttcttccatatccgacgtcaagtttagtcacagtggccgatacatgatgacaagggactacctttccgttaaagtgtgggatctcaacatggaaactaggcctgtggaaacatatcaggttcacgaatatctccggagcaaactttgttctctctatgagaatgactgcatctttgacaagtttgagtgctgctggaacggttccgatggcgccctcatgactgggtcctacaacaacttcttcagaatgtttgacagaagcacacggagggacgttactttggaagcatcaagagaaagcagcaaaccacgagccattttaaagccccgcaaagtttgtactgggggcaagagaaagaaagatgagatcagcgtggacagtctggactttaacaaaaagatcctacacacagcgtggcatccccttgagaacatcattgccgtcgcagccaccaacaacttgtacatattccaagacaaagtcaactagagaggtcagctcctctggggacattgtcttactcctgcctccggaagcctggtcgcttttctgttcaaagaaaaacattcttgtcctctccatgaagaacactgatgcattcatgtcccttgacaggtaaaggaaagaagctggcctggtttggtcattcaggngatcactctgctttcacagaagtgggaagaacccatgagaaacaaggttgatg

SEQ ID NO: 188 - protein, 254 aa, Macropus eugenii
  misc_feature (222)..(222): Xaa can be any naturally occurring amino acid
  misc_feature (236)..(236): Xaa can be any naturally occurring amino acid
  misc_feature (254)..(254): Xaa can be any naturally occurring amino acid
FFEEPEDPSSRSFFSEIISSISDVKFSHSGRYMMTRDYLSVKVWDLNMETRPVETYQVHEYLRSKLCSLYENDCIFDKFECCWNGSDGALMTGSYNNFFRMFDRSTRRDVTLEASRESSKPRAILKPRKVCTGGKRKKDEISVDSLDFNKKILHTAWHPLENIIAVAATNNLYIFQDKVNREVSSSGDIVLLLPPEAWSLFCSKKNILVLSMKNTDAFMSLXQVKERSWPGLVIQXITLLSQKWEEPMRNKVDX

SEQ ID NO: 189 - DNA, 754 bp, Macropus eugenii
ccagagtactctccatggcctgcttattgctcctcacgtttgtgaatggctccagcgtccggtgggccacacggatccaagacatcttcacaggagggaagttgctggctctcgccctcatcatcactgttggcttcatccagatcttccagggcaactatgaggagctgaggcccagcaacgcctttagcttctggatgacacctaccgtgggacacctggctcttgctttcctgcaggcatcctttgcattcagcggctggaacttcctcaactatgttacagaagaactggttgatccccgcaagaacctacctcgagccatcttcatctccatccccctggtgacatttgtgtacacgttcaccaatgtggcatacttcacagctatgaccccacaggagctcttgtcttccaatgctgttgctgtgacatttggagagaagcttctgggctacttctcttggatcatgcctgtctcagtcgccctctccaccttcggaggaatcaatggatatcttttcacctcctccagattatgcttttctggagcccgtgaaggccaccttcccagcctgctggccatgattcatgtccaacactgcacccccatccctgcacttctcgtctgttgcggagccacactagtgatcatgcttgtgggagacacatatacattatttaactacgtgtccttcatcaactacctctgttacggagtgactatcatttgcttgattgtgctgcgatgaag

SEQ ID NO: 190 - protein, 251 aa, Macropus eugenii
  misc_feature (251)..(251): Xaa can be any naturally occurring amino acid
RVLSMACLLLLTFVNGSSVRWATRIQDIFTGGKLLALALIITVGFIQIFQGNYEELRPSNAFSFWMTPTVGHLALAFLQASFAFSGWNFLNYVTEELVDPRKNLPRAIFISIPLVTFVYTFTNVAYFTAMTPQELLSSNAVAVTFGEKLLGYFSWIMPVSVALSTFGGINGYLFTSSRLCFSGAREGHLPSLLAMIHVQHCTPIPALLVCCGATLVIMLVGDTYTLFNYVSFINYLCYGVTIICLIVLDEX

SEQ ID NO: 191 - DNA, 753 bp, Macropus eugenii
  misc_feature (546)..(546): n is a, c, g, or t
  misc_feature (635)..(635): n is a, c, g, or t
  misc_feature (640)..(641): n is a, c, g, or t
ctccattgcgacgaaatactttaatggccttgctattcctattttgttattattcctatcattactgtttttgttttgttgtaattgttatgtgtatactcagatgaaacggatatatactaatttcactcccttgattcggtcaccttatgtccttcgtgaccttaaggccaaatgaaggaatattttatatcccttgaataaagtaagttcactctgtccttttggtgacctctcaaggaacataacatgcgcgagttggccatgccttaatgttttgggaactagccactcccggaacacatagataatacttggaggatctggctagtcctcccagtatatgattaattgacttatatcttgtggcccctgtatggtatctccttgatggacaaaacctgtattcccatggccatgtgcctgaccagcttggaacagtgtgcggaaccattggcaaaaagccttctatctaggtccctataaagtccccccgcctagtgtaagtcctcagattctcacccatggagaggacactctgcctgngactacttgctcccattcagaccctgaaagctgtatcccgggattccccagctgagaaaatgcaggtgttggtgcttccctgaattggngatgnntttctattttctcatatatctaatataaatatgctataattatattagtattaggctatattaaattatttctgctgtagctctaaactgttcatgcatttgccctttctga

SEQ ID NO: 192 - protein, 71 aa, Macropus eugenii
  misc_feature (45)..(45): Xaa can be any naturally occurring amino acid
MAMCLTSLEQCAEPLEKAFYLGPYKVPPPSVSPQILTHGEDTLPXTLAPIQTLKAVSRDSPAEKMQVLVLP

SEQ ID NO: 193 - DNA, 751 bp, Macropus eugenii
  misc_feature (579)..(579): n is a, c, g, or t
  misc_feature (601)..(601): n is a, c, g, or t
  misc_feature (617)..(617): n is a, c, g, or t
  misc_feature (661)..(661): n is a, c, g, or t
  misc_feature (725)..(725): n is a, c, g, or t
gctgtttccctgaggtttggcggactgctgcacaattcctcacatgcatagtgtcctgttctggtgacctggcctattccctctgatacttagttctctggtccagcggtagcagtttagagcctatcttctctggtactggcagttcagagctttgcagtgctggtgcttcaaggttgcagccccagggagtctttctcctgaagggttatgatcaagctgactgtcaaggtctaaacaaacttccactgcctggggctggggtatctatggcacaggaaagaggcagggtggagtagttgtggagagttagggtttgatataagtctgagtcatgttctgtttgtgtggcctcgctgctagtagtttgggaagtagaggaggggtacaagattagcgaccatccattcctagggtttgtttgtttatttttgacctttttttggattctgagtgtcctagaccatggaaacaactgaagttgctttatatttcatgcataatatctgttttgaagagatttaagaggttatgggaatcagagaaaatgtccagtcctctgttttattactcatatgnacctgaagtctcctaatggttntctaaatatcatatanagaatccccagcagttgaggaaactaaggagattagaacagcanatgtttaggaactgagtgaccacactcactctaccttgtgaaatcattctggagctaactcagntccatccaacttctgtcctgtgagaa

SEQ ID NO: 194 - protein, 93 aa, Macropus eugenii
MDGANLDPSSTSQTTSSEATQTEHDSDLYQTLTLHNYSTLPLSCAIDTPAPGSGSLFDLDSQLDHNPSGERLPGAATLKHQHCKALNCQYQRR

SEQ ID NO: 195 - DNA, 749 bp, Macropus eugenii
  misc_feature (455)..(456): n is a, c, g, or t
  misc_feature (458)..(458): n is a, c, g, or t
  misc_feature (552)..(552): n is a, c, g, or t
  misc_feature (562)..(562): n is a, c, g, or t
gtggcaccatgaaatttaccatcgttgccctctacttcgccctcagcctggctggcatgaccagctcagaaaaatgtttagaccaaatccaagtgaactccctggagaacctatctctgttggttccatctttatgtctgctcccacctgtgaggggtaactgcagttctcaaattcttcactatttctacaacacaacctctcgaacctgtgagactttcatctacagtggctgcaatggcaataggaacaattttaactcggaggaatactgcttaaagacctgcagacgcaacaagaacaggaacaataataactgaagctgatgttgaccattctgggagcaaccacatcacttccttgaccagtcctactgccatccaaactctggtgatgctgtcctgtttctttccttctatgattccctcttctggtacaataaagcattaacagcnnanaaaaaaaaaaaaaaaaaaaaaaaaaaaaaaaaaaaaaaaaaaaaaaaaaaaaaaaaaaaaaaaaaaaaaaaaaaaaaaaaaaaaaaaaaaaaanaaaaaaaaangggggggggcgcttttatattttcccttgggggcccaaattttaccccacccaattttttttgacaaagggggcccttattgggggccgttttaaagctaggccctggcccgtgtttttaaacgcggggatgggaaaacctgttactttggttctttgaaaaggaccttctcttgggggggaaaaat

SEQ ID NO: 196 - protein, 148 aa, Macropus eugenii
GTMKFTIVALYFALSLAGMTSSEKCLDQIQVNSLENLSLLVPSLCLLPPVRGNCSSQILHYFYNTTSRTCETFIYSGCNGNRNNFNSEEYCLKTCRATRTGTIITEADVDHSGSNHITSLTSPTAIQTLVMLSCFFPSMIPSSGTIKH

SEQ ID NO: 197 - DNA, 780 bp, Macropus eugenii
  misc_feature (601)..(601): n is a, c, g, or t
  misc_feature (639)..(639): n is a, c, g, or t
gaaatagtgagattgggaaggctaccaaaaccatctatggaaacttccagagcatgaatggtaccctcaaccagttcccgccctccatttatggtgagaccttgatccgttcctacatagggaagacccagagagtgatatatcgaagcaatgacccaggagccatctttaacctcagccaaaaccttcctgacatcaccttcatggaaaatggaactttgctgtggactccactatccttgaccccttttaaccttgagctcctggcaagtaattcggaaggcttgtattctgttctacaacctcaggttgtgctctgcaactgctcaaatgagaaccagtgtaactacagtgacagcagcaggctgtccaactcgtcccttcaggtggcagcttgtacatgtaaccaggaaacttttggccttttctgtgaacgccgggttaacctctgcgtggacggatgttaccctggtgtctcctgtgatcctgtagaggggtgtggcccttgccctaactacatgacaggagatgggaggcactgtgcaagctgtgagaccgcagaatgcccccagaaccattgcttcaatgatggaaagtgctntatctcctccacctgccaacccacctgtgtctgccctncaccctttgttgatgaccgatgcttcatagctgggaactcttttacaccaacccttcctacagacattcctctgagaattcatcagctcttcctcagagaaaatgaatgccttccccagagacgtaatgccacggcactca

SEQ ID NO: 198 - protein, 260 aa, Macropus eugenii
  misc_feature (200)..(200): Xaa can be any naturally occurring amino acid
  misc_feature (213)..(213): Xaa can be any naturally occurring amino acid
  misc_feature (260)..(260): Xaa can be any naturally occurring amino acid
NSEIGKATKTIYGNFQSMNGTLNQFPPSIYGETLIRSYIGKTQRVIYRSNDPGAIFNLSQNLPDITFMENGTLLWTPLSLTPFNLELLASNSEGLYSVLQPQVVLCNCSNENQCNYSDSSRLSNSSLQVAACTCNQETFGLFCERRVNLCVDGCYPGVSCDPVEGCGPCPNYMTGDGRHCASCETAECPQNHCFNDGKCXISSTCQPTCVCPXPFVDDRCFIAGNSFTPTLPTDIPLRIHQLFLRENECLPQRRNATALX

SEQ ID NO: 199 - DNA, 784 bp, Macropus eugenii
  misc_feature (593)..(593): n is a, c, g, or t
  misc_feature (740)..(740): n is a, c, g, or t
  misc_feature (762)..(762): n is a, c, g, or t
gttattcacaatttacagatggagaaactgaggcaaacagattccacaacttccccagggtcatacagctaatgaaagtgtctaagaccatattcgaactcagctcttcctgagctctggggcctgtggtgttcccctcccccagagctgctggatagggaggtgtaagggagaaaggggaagggaagtaagtcatagctaaccccaagcaatctcttgttccccagtattctcaggtcggcaacttggcctcctatgtgcctgcccaccttctccgtctctatcacctgttgctgttcacacttcctgggacacccatctttagttacggggatgaaattggcttgcaggcagccaccctccctggacagcctgctgaagcccccatcatgctttgggatgaaaagacacttgggccttctgagtctgtgaacctcaacatgacagtccagggccagaacaatgatcccacttccctccttgctctgttccgaaaactgagtgacagccgcggtaaggagcgatccttgctgcacggggactttgtggtgctgcccacccaagacaacctctttgcctacttgcgatactgngatcaaaatgagcgatttgttattgtcctcaacctgcgctccacgagtcaggaggctgatctgaggatgccccctgtggctggcagcccagagcctggagtttcctgagaaggcagcgctggtgctcagtacccaagggggcctcangatggcagcatgctgcccctcnaaagctggctgtgccccgggga

SEQ ID NO: 200 - protein, 260 aa, Macropus eugenii
  misc_feature (196)..(196): Xaa can be any naturally occurring amino acid
  misc_feature (245)..(245): Xaa can be any naturally occurring amino acid
  misc_feature (260)..(260): Xaa can be any naturally occurring amino acid
YSQFTDGETEANRFHNFPRVIQLMKVSKTIFNSALPELWGLWCSPPPELLDREVKGERGREEVIANPKQSLVPQYSQVGNLASYVPAHLLRLYHLLLFTLPGTPIFSYGDEIGLQAATLPGQPAEAPIMLWDEKTLGPSESVNLNMTVQGQNNDPTSLLALFRKLSDSRGKERSLLHGDFVVLPTQDNLFAYLRYXDQNERFVIVLNLRSTSQEADLRMPPVVAAQSLEFPEKAALVLSTQGGLXMAACCPSKAGCAPGX

SEQ ID NO: 201 - DNA, 770 bp, Macropus eugenii
cgcggtggtctctgctaagtcattaagtagctgcggagcaggccgcaacatgtctgacaaactgccctacaaagtcgctgacatcagcctggctgcctggggacgcaaggccctggacatagcagagaatgagatgcctggcctgatgaaacttcgagagatgtactcagcctccaagccgttgaagggtgcccggattgctggctgccttcacatgactgtggaaacagctgttcttattgagacactggtggccctgggagctgaggtacagtggtccagttgcaatattttctccacccaggaccatgcagtagctgccattgccaaactggcattcctgtgtacgcttggaagggggagactgatgaggaatacctctggtgcatcgagcagaccctctatttcaaggatgggcagcccctcaacatgatcctggatgatggtggggacctcaccaacctcgttcacaccaaataccctgagctcctgaagggtactactaggcatctcagaggaaaccaccacaggcgtccataatttatacaagatgaaactcatatggagttctgaaagtgccagctatcaatgtgaacgattctgttaccaagagcaagtttgacaacctatatggctctcgcgagctcctcattgatggcatcaaacgagccacagatgtgaatatgcaggcaaggtggctgtggtagcaggctatgtggatgtggcaagggctgcgctatgcccttcggagctttgggcccgagtcatat

SEQ ID NO: 202 - protein, 240 aa, Macropus eugenii
  misc_feature (96)..(96): Xaa can be any naturally occurring amino acid
  misc_feature (210)..(210): Xaa can be any naturally occurring amino acid
MSDKLPYKVADISLAAWGRKALDIAENEMPGLMKLREMYSASKPLKGARIAGCLHMTVETAVLIETLVALGAEVQWSSCNIFSTQDHAVAAIAKLXIPVYAWKGETDEEYLWCIEQTLYFKDGQPLNMILDDGGDLTNLVHTKYPELLKGTTGISEETTTGVHNLYKMKLYGVLKVPAINVNDSVTKSKFDNLYGSRELLIDGIKRATDXEYAGKVAVVAGYVDVEGLRYALRSFGPESY

SEQ ID NO: 203 - DNA, 781 bp, Macropus eugenii
  misc_feature (642)..(642): n is a, c, g, or t
  misc_feature (735)..(735): n is a, c, g, or t
  misc_feature (750)..(750): n is a, c, g, or t
  misc_feature (763)..(763): n is a, c, g, or t
caacctcgcagatctgaccagagcagtgaatgccctgccccagaacatgacctcacagatgttcagtgccattgctgctgtgactggccaaggacagaaccccaacgccaccccagcccagtgggcctccagtcagtatggctacggcggcagtggaggtggcagcagtgcttaccatgtgttcccaacccccgcccagcagcctgtggccacgccactgatgacacccagctattcctacacaacccccagccagcccatcaccacaccccagtaccaccagctacaagccaacaccaccccacagtccacccagacccaggcccagccccagccctcctccagctcccggcaccgacagcagccaaagtccaacagccatgccgccatcgactgggggaagatggcagagcagtggctccaggagaaggaagcagagcgtcggaaacagaaacagcgactaacgcctcgcccctcacccagccccatgatcgaaagcacccccatgtccatcgctggcgatgccacgccgctgctggatgagatggaccgctagggcaaccaccctggactctggtcgtatccagggctgagctccccaacagctcgctttctgtccatttgatggcatgaatgacattntccacgctggtcagcttggatgggtgatgggaatgggtcacccaatgtatacaagtacaggtgctaggtggcagccctccccatgctgatccnccatcttttggcggngaaggaggacggnactggagcacagtttgtt

SEQ ID NO: 204 - protein, 184 aa, Macropus eugenii
NLADLTRAVNALPQNMTSQMFSAIAAVTGQGQNPNATPAQWASSQYGYGGSGGGSSAYHVFPTPAQQPVATPLMTPSYSYTTPSQPITTPQYHQLQANTTPQSTQTQAQPQPSSSSRHRQQPKSNSHAAIDWGKMAEQWLQEKEAERRKQKQRLTPRPSPSPMIESTPMSIAGDATPLLDEMDR

SEQ ID NO: 205 - DNA, 745 bp, Macropus eugenii
  misc_feature (603)..(603): n is a, c, g, or t
  misc_feature (734)..(734): n is a, c, g, or t
ctgggctggaaccagaggacctggttgaagcccatggaacattctatacctctcactgtatcagctcccactgccacaaagagtatgacctgggctggatgaaagataagatcttctcagaggtgacccccaagtgtgacaaatgccagagtctcgtgaaaccagacattgtcttcttggcgagaccctcccagggcgcttcttctcctgcatgcaatcggatttccagaaggtggatctgcttatcatcatgggcacctccctgcaagtgcagccctttgcctccctcgttagcaaggccccacttacgactcctcgactcctcatcaataaggagaagacaggacagcgggatcccttcttggggctcatgggtatggggggaggcatggatttcgactcggacaaggcttacagggatgtggcctggcttggggactgtgatgagggctgtctggccttggctgacctcctgggatggaagaaagagctggaggcactggtgaagaaggagcatgcagccattgacgcccaggctgggaccagcctgcatcctctcagcgcctcagggaagtctgcccaggctgacaaagagccccgcanagctgcagaaggacagaagccccagtgattcagcctccacaccccactggggggtccagagactggggccccctcgccctggggctgccactcagaggacagacactgccctcatctctaaccctcctggngatgagcagct

SEQ ID NO: 206 - protein, 249 aa, Macropus eugenii
  misc_feature (201)..(201): Xaa can be any naturally occurring amino acid
  misc_feature (210)..(210): Xaa can be any naturally occurring amino acid
  misc_feature (241)..(241): Xaa can be any naturally occurring amino acid
  misc_feature (245)..(246): Xaa can be any naturally occurring amino acid
  misc_feature (249)..(249): Xaa can be any naturally occurring amino acid
GLEPEDLVEAHGTFYTSHCISSHCHKEYDLGWMKDKIFSEVTPKCDKCQSLVKPDIVFLAETLPGRFFSCMQSDFQKVDLLIIMGTSLQVQPFASLVSKAPLTTPRLLINKEKTGQRDPFLGLMGMGGGMDFDSDKAYRDVAWLGDCDEGCLALADLLGWKKELEALVKKEHAAIDAQAGTSLHPLSASGKSAQADKEPRXAAEGQKPQXFSLHTPLGGPETGAPSPWGCHSEDRHCPHLXPSWXXAAX

SEQ ID NO: 207 - DNA, 746 bp, Macropus eugenii
  misc_feature (645)..(645): n is a, c, g, or t
gtaaatgtacattacaggattgccttagattattttccaaagaggaaaaactcacagataacaacagattttactgtagccattgcaaaactcgaagggactcaatgaaaaaaatagaaatctggaagttaccacctgttcttctagtacatctgaaacgtttttcctatgatggaagatggaagcaaaaactacagacatctgtagattttccattagaaaatctggacttatcacaatatgttattggtccaaagaataatttgaagaaatacaatctgttttcagtttcaaatcactatggcggactggatggaggacactacactgcctactgtaaaaatgctgcaagacagcgatggtttaagtttgatgaccatgaagtgtctgacatctccgtgtcctctgtgagatcctcagcagcctacatcctcttctacacatctttggaacagagagtcacggatgtggccacatgagaagagtgtgtagagagctagcagcccaactctagaaatgcatagtaagatgcagagtagttagacgcaagcatttaaaagacttaagagtgagagctgtgttactgaaactccgtatttcaggtcagtgctactactttatcaggaagctgacgtcatctaatanatattacagtaagcatcctttatagattctacttatttcaacacaacttttttagtctactcccaaattaaattataactcattatttgctgtctatttag

SEQ ID NO: 208 - protein, 158 aa, Macropus eugenii
KCTLQDCLRLFSKEEKLTDNNRFYCSHCKTRRDSMKKIEIWKLPPVLLVHLKRFSYDGRWKQKLQTSVDFPLENLDLSQYVIGPKNNLKKYNLFSVSNHYGGLDGGHYTAYCKNAARQRWFKFDDHEVSDISVSSVRSSAAYILFYTSLEQRVTDVAT

SEQ ID NO: 209 - DNA, 730 bp, Macropus eugenii
  misc_feature (662)..(662): n is a, c, g, or t
  misc_feature (700)..(700): n is a, c, g, or t
gaaggtttctcaggctgatatcaataaggctgatataaactcagaaagggtcatcttggagttagaagagccagcttccaatcacaacgggggtcaactcctctttggccttgatgattatttgtatatatttactggggatggcggagaagctggagacccctttggcaaatttggaaatgctcagaacaagagctcactgctgggaaaagtgctgaggatagatgtaaaccagcgaggccctgataagcgttatgggatccctccagataaccccttcgtctctgagcttggggctcaccccgctgtctatgcctacggggttaggaacatgtggcgctgtgcagtcgatcgaggtgaccccaccacgcagaagggccgcggccgaatattctgtggtgatgtgggtcagaacaggtttgaagaggtggacctcattgttaaaggaggaaactatggctggagagctaaggaaggctttgaatgttacgacattaaactctgccataatgcctctttagatgacatcctaccaatctatgcttatggccatttggtgggaaagtcagtcactggaggatacgtctatcggggatgtgaatccccaaatctaagtggcctctacatctttggggactttatgagtggtcgacttatggctntgcaggaagatgagagaacaaatacatggaagaaacangacatctgcattggcagcactaagacttgt

SEQ ID NO: 210 - protein, 243 aa, Macropus eugenii
  misc_feature (221)..(221): Xaa can be any naturally occurring amino acid
  misc_feature (233)..(233): Xaa can be any naturally occurring amino acid
KVSQADINKADINSERVILELEEPASNHNGGQLLFGLDDYLYIFTGDGGEAGDPFGKFGNAQNKSSLLGKVLRIDVNQRGPDKRYGIPPDNPFVSELGAHPAVYAYGVRNMWRCAVDRGDPTTQKGRGRIFCGDVGQNRFEEVDLIVKGGNYGWRAKEGFECYDIKLCHNASLDDILPIYAYGHLVGKSVTGGYVYRGCESPNLSGLYIFGDFMSGRLMAXQEDERTNTWKKXDICIGSTKTC

SEQ ID NO: 211 - DNA, 733 bp, Macropus eugenii
  misc_feature (623)..(623): n is a, c, g, or t
cacagatcccagaagccagacagcctaggtctaagcataaaaggagtaggaggtacaaagaccaccaggaccagccatggagccctggcagaggttgctgctgctgctgctgtctcccctgctgtggcttccctcgtcatcctcagccttctgtaccctggacgaagagggcgataattgcttctgcaacttttctgccccggagcccaaatggaatgacattgcgatgtgcatttccgctgtagaggtggagatccttgggggcagccacaacttggaaacctttttgcagaaggattttgctgtctcgagcaaagcagtggactttctgaaagcgttgcgcctcaagcgactgaagctaaaagaagccctgattccagccccacttctgtaccagttcctgagggctctgacctacactcggatgaaggagctggccctggaagacctggtgatctcgcacccacctctgcaacctcgatcgcccattgacaatgacctgccactgacagccctgaacctcaacagagtgtcattggctggagagagcaacttactggccgcaattggaccttggctcaaacctggactgaaggcactgcgtttgactggtttgggcctgngcaatgtgccctgcccagacttgggcacctttaaagaactgaactttctagatctgtcagacaatccagagataggagagagtggcttaactagggccttatgcctcaag

SEQ ID NO: 212 - protein, 244 aa, Macropus eugenii
  misc_feature (208)..(208): Xaa can be any naturally occurring amino acid
HRSQKPDSLGLSIKGVGGTKTTRTSHGALAEVAAAAAVSPAVASLVILSLLYPGEEGDNCFCNFSAPEPKWNDIAMCISAVEVEILGGSHNLETFLQKDFAVSSKAVDFLKALRLKRLKLKEALIPAPLLYQFLRALTYTRMKELALEDLVISHPPLQPRSPIDNDLPLTALNLNRVSLAGESNLLAAIGPWLKPGLKALRLTGLGLXNVPCPDLGTFKELNFLDLSDNPEIGESGLTRALCLK

SEQ ID NO: 213 - DNA, 734 bp, Macropus eugenii
  misc_feature (695)..(695): n is a, c, g, or t
ggatgaattgatgaatagagttaaaaggatgtgtttcatgtgtagttttaggaattactttattagttgaagtcatcttggcaactacttcattggctatgtcaatttataatagccagaatgaaatggttcaagcttctgaattacatgctcttatgaaaaatgtattggctggatttagacatcaagcaaagatagatgatgagttttataaagccctttattctttacaaaaggcaactgaggtaattggagaagaagttgcaatgatacaactgcaacaaaaattacagtgtgattacagatataatacattttgtctaacaaagaaaaaatatgagtctcaactgcaatgggaagaaattaggacacaattacatgggttagttgccgacaatattacattggaaattcaacaattgataaaactagcacaagagactgatgaagaagcagatactgattttgtacctgaaaaaacagcagcaaagatacatgatttctttaagcatattgtttcttagggatctgtcaaaaattggttgcgccaagtattataggcttcgtagtattgtttttaggatgcattattatacccatatgtattacgttttcattgcatagtttgtataatgctctactttccagtaagcaaagtgttcttatccttaaagatcagatgtatcaaaacaaanagggggaattgtaagggaattgccaaccctcagctctct

SEQ ID NO: 214 - protein, 173 aa, Macropus eugenii
DELMNELKGCVSCVVLGITLLVEVILATTSLAMSIYNSQNEMVQASELHALMKNVLAGFRHQAKIDDEFYKALYSLQKATEVIGEEVAMIQLQQKLQCDYRYNTFCLTKKKYESQLQWEEIRTQLHGLVADNITLEIQQLIKLAQETDEEADTDFVPEKTAAKIHDFFKHIVS

SEQ ID NO: 215 - DNA, 741 bp, Macropus eugenii
ccgacatatgtactgtacagagttctccatttcttcttgctaatatgattgtgtatggtctgtgtgcctccccaggacactacacctaggagtagccacatataaaagggacacagcatgtgatggtctcacttccttgttctctgtgcctttatcttatttccattgttaccctactatgcttttggccatgtctcttggcttttgtctcagttgattttagggttctttgtaccaggctgcagaagcttggcagcttctctaggtaggggtgtagactgtggtggcaggccttccaataacaagtgtgctcagattcttatggcatcctaccctccctacccacccccaccatgaaccacgaaccacccttctccttccctctcttgtccctacccaggcaactcttcttgttatagcaccatcgcttcctgattggcttcttcattcaacccaaagtctataatctggagtttactcttccttccaggcacaagtgttaattcgtagatgtagttgcctgttttgcaggaagccagatcagcgtggtcccttgtcatagaaatattgtacttagctcataactcagtgttatccatgtgttgccaggagttctccctcccccgccttcttccgggttgtgcaataactctcccagaacttgtcagtttccatagttccttctgtccattatgaagccctggaagttgggaagagacgggacacataggagggaccatc

SEQ ID NO: 216 - protein, 108 aa, Macropus eugenii
MVPPMCPVSSQLPGLHNGQKELWKLTSSGRVIDNPEEGGGGRTPGNTWITLSYELKYNISMTRDHADLASCKTGNYIYELTLVPGRKSKLQIIDFGLNEEANQEAMVL

SEQ ID NO: 217 - DNA, 745 bp, Macropus eugenii
ggatcgcagggccgcgggcggagccgccgctcgggctgacttgactgttgggtgcagcttggcttcgggagtcatcttctggtcctccggctctccagagtcagtttcgctccctctctcctcccccgcgcctcctccggccggctccgcacccggatggcgccggcctcgctctagccggcgcgcctgcgcagtctcgcggcctggggtgggggtgcggagcgcggctgctgagccgccggtttcctgccccacttccttctcctcgccctcctggtgcgtcggctcgctgggccggcgggatggcggcgctggggggccgtcggaggtctcctcagccgctgctcctgccgccgccgccgccgacgccgtcgatgctgctgcttttgctgctgatgaccccgctcggggtccgagccgtgcccgaggaagacgccggcggccggaacaaggaacctccggcgcctcctcagcagctccagccgcacgcggccgcggctccgaggcccgagttggtccgcgccgagaaaggacctcctacaacttcctcaattcatattaataatgaagatcctgctggccagactaatttgggatttatccatgcattcgtggctgccatatcagttattattgtttctgaatcacgggattaagacgctctttatagctgccttcatggctatgagatataaccgtttgcctgcgccacccgtgcctacccggacctggccccatgacatgt

SEQ ID NO: 218 - protein, 201 aa, Macropus eugenii
MDKSQISLASRIFIINMNEEVVGGPFSARTNSGLRSRGRVRLELLRRRRRFLVPAAGVFLGTARTPSGVISSKSSSIDGAAAAAAGAAAEETSDGPPAPPSRRPSEPTHQEGEEKEVGQETGGSAAALRTPTPGRETAQARRLEEAGAIRVRSRPEEAAGEERGSETDSGEPEDQKMTPEAKLHPTVKSARAAAPPAALRS

SEQ ID NO: 219 - DNA, 744 bp, Macropus eugenii
cagtactgtatttcacatggctggtttttgactggaacaccccaaagaaaggtggcaggagatcaaagtgggtgagaaattgggctgtgtggcggtatttccgagattattttcccatccggctggtgaagactcacaacttgctgacaacccggaattacatctttgggtatcacccccatggtatcatgggcctaggggccttttgcaacttcagcactgaggccacggaggttggaaagaaatttcctgggatccggccttatctggcaactttagctgggaacttcaggatccctgttttaagagaatatttaatgtctggaggtatctgccctgtcaaccgtgacaccattgactatctgctttccaagaatgggagcggcaatgctatcatcattgtggtggggggcgctgctgagtccctgaattccacaccaggaaagaatgctgtcactctgaagaaccggaagggctttgtgaagctagccctgagacacggggctgacttagttcccatctattcctttggggagaatgaggtttacaagcaaataatctttgaagaaggttcatggggccgatgggtccagaagaagttccagaaatacattggctttgctccctgccttttccacggtcggggcttcttctcttccatacttggggcctagtgccgtactctaaacccatcaccacagttgtgggtgagcccatcaccatccccaaacttgagcacccagc

SEQ ID NO: 220 - protein, 248 aa, Macropus eugenii
  misc_feature (220)..(220): Xaa can be any naturally occurring amino acid
VLYFTWLVFDWNTPKKGGRRSKWVRNWAVWRYFRDYFPIRLVKTHNLLTTRNYIFGYHPHGIMGLGAFCNFSTEATEVGKKFPGIRPYLATLAGNFRIPVLREYLMSGGICPVNRDTIDYLLSKNGSGNAIIIVVGGAAESLNSTPGKNAVTLKNRKGFVKLALRHGADLVPIYSFGENEVYKQIIFEEGSWGRWVQKKFQKYIGFAPCLFHGRGFFSSXTWGLVPYSKPITTVVGEPITIPKLEHPA

SEQ ID NO: 221 - DNA, 558 bp, Macropus eugenii
tgcatttcttaggctgtcatccacgacactaagaccatgaagttcttcaccatcctgttcttggtcggtgtggcctgtgctgtgggctccagcttccctgcagagacaacagtggacagcagtctcagggaggaagagaccatagtcagagactctgccaggatcagtatcacagccagtgacgccaccattgctcctgacaccacgcgaaagacttcatcgtacaactttgtgaagatactaaaaaagtatattgaagaagccattcgctatctggatgatttaatgaagtttaattggaggaaaacccaggagagacagcagagaccataggcatgatgtcccattcttgcctccttcgtctgcctcctttttacccctcccatcactctctgatcatctatggagctggggacagagtctacaacatttaataaaacttatctggtgatggaaaggaaaaaaaaaaaaaaaaaaaaaaaaaaaaaaaaaaaaaaaaaaaaaaaaaaaaaaaaaaaaaaaaaaaaaaaaaaaaaaaaaaaaaaaaaaaaaaggggg

SEQ ID NO: 222 - protein, 132 aa, Macropus eugenii
  misc_feature (88)..(88): Xaa can be any naturally occurring amino acid
MKFFTILFLVGVACAVGSSFPAETTVDSSLREEETIVRDSARISITASDATIAPDTTRKTSSYNFVKILKKYIEEAIRYLDDLMKFNXEENPGETAETIGMMSHSCLLRLPPFYPSHHSLIIYGAGDRVYNI

SEQ ID NO: 223 - DNA, 752 bp, Macropus eugenii
  misc_feature (705)..(706): n is a, c, g, or t
  misc_feature (713)..(713): n is a, c, g, or t
ccctcgcctctggcccgggcgcaggtggccatggcgacgtcgtggaagcctgtcctgcagccctggatccgggatctactcctcgggctggagcctggagaggacctggggctggaggggaagagagaggggctcgggcagctgctggaggtgattgaggaagccaagcctggagagagcctggagctgcttgatggagaggccgctgctgtactgctggtgacagatggcacccacagcgtgcattgcctggtgacccccgaggccctgaacaaggctgcctgggaggagaagcactttggttttaggaggacagtgggccggctgcttctcctgcaggacttcagggtgtctgtccaagaggtggcccagactcctgcgggtaatgggcagttctgtctttgggtgtatcgcttcatcctgctgcccacggagctgccaagggagggcgtgaccagctgtaactgggacccagctgttcagagaaaacttcaggagtataaaaagcaccatgaaagggagaggagcccccctaacatagactcatcctcccccagatcgaggttctgcattgtcccagttactggaagagatgtgtgaagaccgacgaagcttactaagctgtcaggcccagagctgcctggagctggggggctcccagaggggttctctgccccttactcgatgggaagcctctcgaagganngacccgngagaagctgtgttcactgttccaggcctgaggctgcatt

SEQ ID NO: 224 - protein, 206 aa, Macropus eugenii
  misc_feature (182)..(182): Xaa can be any naturally occurring amino acid
PSPLARAQVAMATSWKPVLQPWIRDLLLGLEPGEDLGLEGKREGLGQLLEVIEEAKPGESLELLDGEAAAVLLVTDGTHSVHCLVTPEALNKAAWEEKHFGFRRTVGRLLLLQDFRVSVQEVAQTPAGNGQFCLWVYRFILLPTELPREGVTSCNWDPAVQRKLQEYKKHHERERSPPNIDXILPQIEVLHCPSYWKRCVKTDEAY

SEQ ID NO: 225 - DNA, 738 bp, Macropus eugenii
  misc_feature (717)..(717): n is a, c, g, or t
gttcagaatcactaccttctgcttccagcccaccgcccccgcccagggccctgggccagcacccctgtcaggagtgttctccctctacacaaagacctcccaagtccaggtgaagctacaggggacggtcctccttacctgtggattcacagtggaccatgcccacgaggctgtggatgtgacatggacttttcggcagaagcggggatggcatcaggaggtgttgaagtatgctgggaaacaggtgacccaccttcacaagcaggtggaagccttccccagtgagatccctcgtggcaatgcctccatccggctcaccaacatggcagtcaaggatgagggcagctatttctgctctgtgaacgtggctgggctccatgggcagctcagcgttgaggtggctgttgtggaggcccccaaagtgacgctcagcccccagaccccagttctgaccttggaggaaggggaggagcaaaagttggcatgtgaggtcagccgctacttcccgttagaagcccatgtgcaatggcttcgtgagcccgtggaaggccgcatgcttccagaggtggtgaggaatgtcatcttcagtaatcaccggcagagcagcgatgaaacctacagcttctccagctactttctcctgaaggcctcactccaggatgatggtgtacgctacacctgccgggtggaacatgagggccttcagatgcccatcangaaaagcatcatgatcacagt

SEQ ID NO: 226 - protein, 246 aa, Macropus eugenii
  misc_feature (239)..(239): Xaa can be any naturally occurring amino acid
FRITTFCFQPTAPAQGPGPAPLSGVFSLYTKTSQVQVKLQGTVLLTCGFTVDHAHEAVDVTWTFRQKRGWHQEVLKYAGKQVTHLHKQVEAFPSEIPRGNASIRLTNMAVKDEGSYFCSVNVAGLHGQLSVEVAVVEAPKVTLSPQTPVLTLEEGEEQKLACEVSRYFPLEAHVQWLREPVEGRMLPEVVRNVIFSNHRQSSDETYSFSSYFLLKASLQDDGVRYTCRVEHEGLQMPIXKSIMITV

SEQ ID NO: 227 - DNA, 634 bp, Macropus eugenii
ttgctgaccgctctgcacatgatgaatctcctggcaacaacgtggtagacatcagtgtcccccccaccactgatggacagaaatccaacaaactccagtgctgccagaacctgtgaccacctgcgcctagaggcgccttccctgcctgcccttacctcgctgtgcttcagttagaaacgtgtgtgcacgtctttgcagttatctcctgtgattcagtgactctttgtcatccttgtttcttcccccatccccatcgtccatttttgagcattaactgtaggcctaaccctccctttcctctcaggctcccaggggagtgggctgaccttgggcctggtcgtgcaggctctgccctcagagggtgagccttggcttctcccctaggcagtgccatttggttgtctagtaattggtgggaggagaaggaggaaccaagacctcatttatcacagctgaaggaagacatacctacactgatttgcttttgcatttagcccaactttttcatagacccttagatttctggggaagatggagagcagggaaggaaggaggtgtgctgaaattaaagagggaaaaaatcttttcctcaaaaaaaaaaacccccccacccctccctacccctacacctttg

SEQ ID NO: 228 - protein, 42 aa, Macropus eugenii
  misc_feature (33)..(33): Xaa can be any naturally occurring amino acid
ADRSAHDESPGNNVVDISVPPTTDGQKSNKLQXLPEPVTTCA

SEQ ID NO: 229 - DNA, 717 bp, Macropus eugenii
ctgcaggatgcctgggccactggatgggtcagcctcactggcccaacgagaggtggtagtgattccctgaggataagagggactgatgcctttctaacatgtcccagaaaagaagttgttctcaagactccaagaactgagagactccagctcagccatggaatgccctcctggcagtctgcccatccgagatggtcccacagactccctgtggcccagtcctgcaccagtgatccagagccctgagtccaaagagccacagccctagagaggagtgaaggaaacagatcccatgagaaaggagcaagcagctgcctattgattctttcaaagcctcaggtgccttggcttcccttgtaagagacccctgatgatgcctgtgacagtggcctctatgctgcaggagccagatcagcttgcagctcctccagtctcccctcctccctccggagcatgtctttcattacccttcagattgaggggtaagctggcccactctcttgcttccgggagatggcgcagcaaggcctgaagtatatgaagggttctcactcatggcccaagttcttctgtggataactccctcagtgcctaggtctgaggctgcctccagcagacaccaaccacaagtgccaattataaaccaaataagtacctcctggactgatggccttagggcctagcaggcattcaggaaaggcctggagaccacttatc

SEQ ID NO: 230 - protein, 161 aa, Macropus eugenii
  misc_feature (85)..(85): Xaa can be any naturally occurring amino acid
  misc_feature (102)..(102): Xaa can be any naturally occurring amino acid
LQDAWATGWVSLTGPTRGGSDSLRIRGTDAFLTCPRKEVVLKTPELRDSSSAMECPPGSLPIRDGPTDSLWPSPAPVIQSPESKXATALERSEGNRSHEKGXKQLPIDSFKASGALASLEETPDDACDSGLYAAGARSACSSSSLPSSLRSMSFITLQIEG

SEQ ID NO: 231 - DNA, 711 bp, Macropus eugenii
ctgctgttctcggaatgtttgctggatgaatgtatctgaaacaggactctaacttgtatacacatctgtccactgtggctactaattaattacccaatgttccaaaccattaacgtgtgtactgggaatgtattaactttgtgcttccttgttaaacaggagaaacatcagctgttcagtaaagagagagttttgttgttcagaaggccatttatgaaattttggtccaagccctgtaagaaatttaggaaaactggcagttattcaagaaaaagaaaacttctgtaactgatattaagtttctctccaaaacctacaaccaaacagctgtgctcagatggaaagctagaggaatgttggtgttttgccacacctttgctgccgtgttgttttctcacatctggcattgaccttcgttgttccatcaacactcatgtgttttgtgtattttagatgttgctaaaaatgctgttacccttacgcccatatcccactgccatcctcttatccgacaacaaaaaccataaagcataagtggccttcttgaaccaatactttgcacatggatctctccccagtgaaggaatcaagcacattagcaatgatgtacattattaatttcagattttcatttcatgttttattttgcaaatatatctgatgtttggggcttcactatacacaatgtaaatatagctaatgcatttgccc

SEQ ID NO: 232 - protein, 88 aa, Macropus eugenii
  misc_feature (53)..(53): Xaa can be any naturally occurring amino acid
MYIIANVLDSFTGERSMCKVLVQEGHLCFMVFVVDKRMAVGYGRKGNSIFSNXLKYTKHMSVDGTTKVNARCEKTTRQQRCGKTPTFL

SEQ ID NO: 233 - DNA, 713 bp, Macropus eugenii
gacaatatactgagtagctaataatctcaggaaaacacaacataaaagcaaagataaccgtgtctcaggagtaaaggaaagccatggggtcaactggagctgctgtcctggctgccactgtactcttgatcattcaggcctcagaggccattctccctgtagcctccaactgttgcacagaagtgtcccatcaggtttctagaagacttttagcaaaagtgaaaagatgtcactttcaaagagctgatggagtttgtgacctaccagctgtcatcctccatgtccatcatcgaaaattctgtgtcagcccacataatcacacccttaagacatggatggaaacgcaaaagaacaagaaaaatacaaaaggaattatttgtaataagaagaaacacccccacgagaacaagtaggaagagcaaagtgacaaaggatcacaaacatggacagaaaactccttattagcaaatgagtctgcaaagggctttcctccagtgaacctggcaagtgactggttatatggatttaccataagttatccacagtcaaatacttactattagataccaacagctcccaaggacaaagaagcagtagacaatatactgagtagctaataatctcaggaaaacacaacatataagccaagataaccgtgtctcaggagtaaaggaaagccattttttatagggaaattgatgccagattatcat

SEQ ID NO: 234 - protein, 158 aa, Macropus eugenii
MGSTGAAVLAATVLLIIQASEAILPVASNCCTEVSHQVSRRLLAKGKDVTFKELMEFVTYQLSSSMSIIENSVSAHIITPLRHGWKRKRTRKIQKELFVKEETPPREQEEEQSDKGSQTWTENSLLANESAKGFPPVNLASDWLYGFTISYPQSNTYY

SEQ ID NO: 235 - DNA, 706 bp, Macropus eugenii
cgcagagattttgagagactggctcatctatatgacactctccatcgagcatacagcaaagtcacagaagttatgcatacgggcaagagacttctggggacttatttcagagtggcattctttggacagggattctttgaagatgaagatggaaaggaatacatttacaaagaacctaaactgacacctttgtcagaaatctctcagagactactaaagctttactcagacaaatttggttctgaaaatgtcaaaatgatccaagattctggcaaggtcaaccctaaggatttggattcaaagtatgcctacatccaagtgacacatgtaatcccattctttgaagaaagaattgcaagaaaggaaaactgactttgaaagaactcataacatccgccgtttcatgtttgaaatgccctttactcagagtggcaagcgacagggtggagtagaggaacagtgtaaacgacgtacgatattgacagcaatccactgtttcccttatgtgaaaaagcgcattcctgtgatgtaccagcatcatacagatctcaatcccatcgaagttgccatcgatgaaatgagtaagaaggtggctgagctcaggcagctgtgcgcctctgcagaagtagatatgatcaagctgcagctaaagctgcagggcagcgtcagtgttcaggttaatgctggccctcttgcatatgcccga

SEQ ID NO: 236 - protein, 235 aa, Macropus eugenii
RRDFERLAHLYDTLHRAYSKVTEVMHTGKRLLGTYFRVAFFGQGFFEDEDGKEYIYKEPKLTPLSEISQRLLKLYSDKFGSENVKMIQDSGKVNPKDLDSKYAYIQVTHESHSLKKELQERKTDFERTHNIRRFMFEMPFTQSGKRQGGVEEQCKRRTILTAIHCFPYVKKRIPVMYQHHTDLNPIEVAIDEMSKKVAELRQLCASAEVDMIKLQLKLQGSVSVQVNAGPLAYAR

SEQ ID NO: 237 - DNA, 705 bp, Macropus eugenii
ctccatttcttggcagagaacttcatattctcctacatgggcttagccctgttcaccttccagaagcacattttcagccctatattcatcattggagcttttattgccatcttcctgggaagagctgcccacatttaccctctctcctttttcttgaatctgggcagaagacataagatcggctggaactttcagcatatgatgatgttttcaggccttcggggagcgatggctttcgccctcgccattcgggacactgcaacctactcccaccagatgatgttctccaccactctcctgatcgttttcttcacggtttggatcatcggtggaggcacaacccccatgttgtcatggctaaacataagagtcggtgtccaggatctgtcagaagaggatctcaatgaaatccgctggaggtatttcagagttggagttgatccagaccaagacccgccacccagcaatgccagctttcaagtcttacagggggatggtccagatgcttcgagaggaaaccgaacaaagcaggaaagtgcctggatattcaggctgcggtatagctttgaccacaattacttgaaacctattctcactcacagtggaccacccattaactacaaccctcccagcatggcgtggcctgctagctcgatgcctgaccagcccacaggtgcatgaaaatcacgaacaactgagagatga

SEQ ID NO: 238 - protein, 235 aa, Macropus eugenii
  misc_feature (235)..(235): Xaa can be any naturally occurring amino acid
LHFLAENFIFSYMGLALFTFQKHIFSPIFIIGAFIAIFLGRAAHIYPLSFFLNLGRRHKIGWNFQHMMMFSGLRGAMAFALAIRDTATYSHQMMFSTTLLIVFFTVWIIGGGTTPMLSWLNIRVGVQDLSEEDLNEIRWRYFRVGVDPDQDPPPSNASFQVLQGDGPDASRGNRTKQESAWIFRLRYSFDHNYLKPILTHSGPPINYNPPSMAGLLARCLTSPQVHENHEQLRDX

SEQ ID NO: 239 - DNA, 713 bp, Macropus eugenii
ggagaaaccgtcagaaaaacaaacggaaacagaagaataaatttctgcctccaaaatcaccaagtgttacagcccccaaggaggagatcgcccctgggctgatggagggggtcgctgaggagccaggggcatctctggaccgaggcggggttcttcgggcaaagatgaagcagcggcttgagggagcgaagttccgcttcctcaatgagcagctttactctgtgaccagcagtgctgcaagccacatcttccaggaagaccctgaggcctttgagctctatcatcgaggctttcagaaccaaataaagcgatggcccttgaagcctgtggaccgaattgtgaaggacttgaaacagcggccagcatccctggctgtggcagattttggttgtggggactgtcgccttgcctctagtgccaggaacactgctcactgcttcgacctggctgcacttgacccccgtgctaccgcctgtgacatgccccacgcgccactgaaggatgagtccgcggacatcgctgccttctgcctttctctgatgggaacacccctgagcgaccctctgaaggaggcaacacgagcgcctgaccccaggacgcctgccaaaagtggctgacgcacccacccgatctgtgcacatgagggccttctcgacccccctcaaccacgctgaccccccagcctgctcccccggcatccgcgcacaagctca

SEQ ID NO: 240 - protein, 237 aa, Macropus eugenii
  misc_feature (237)..(237): Xaa can be any naturally occurring amino acid
RNRQKNKRKQKNKFLPPKSPSVTAPKEEIAPGLMEGVAEEPGASLDRGGVLRAKMKQRLEGAKFRFLNEQLYSVTSSAASHIFQEDPEAFELYHRGFQNQIKRWPLKPVDRIVKDLKQRPASLAVADFGCGDCRLASSARNTAHCFDLAALDPRATACDMPHAPLKDESADIAAFCLSLMGTPLSDPLKEEHERLTPGRLPKVADAPTRSVHMRAFSTPLNHADPPACSPGIRAQAX

SEQ ID NO: 241 - DNA, 666 bp, Macropus eugenii
  misc_feature (616)..(617): n is a, c, g, or t
  misc_feature (640)..(640): n is a, c, g, or t
  misc_feature (663)..(664): n is a, c, g, or t
gccatcttcagaaactattgaggcaaaagtccgtgtggaacataaagaaaaggactccccaaatagtggctctgtggacaactctcagtcccaggactttcaaaatgtgggcaagttagatgtctctttggagaaattacctgaagaagccagcagccttaagaagaagaaagagtggcatcatggggaccaaacagagagttcgctctttgtagcagccaaagctgctcatttctcagaggatctagaagaagaaatcattgatcacaaagtgatttcaaggacaagccacagtgattccagcctttataaccgaagacagggtaataagtcctcagaaatggatcatgtcagccatgggcgtttgagacctggagacatggaagagagaaaaaataggttattaatcaggaaggtgagcagctttggagaggccatgctgcaaggacatcatggtgcacactccgactcacttgtacattttgcacaacaacaagacttggtgtacttcatcctcttcctctggttgctggtttactgcctgttgctctttccacaacttgatatcaaaaaactttgatttgcgtgtttcaataataaagaacagaggcctaannaaaaaaaaaaaaaaaaaaaaaanaaaaaaaaaaaaaaaaaaaaaanngg

SEQ ID NO: 242 - protein, 192 aa, Macropus eugenii
PSSETIEAKVRVEHKEKDSPNSGSVDNSQSQDFQNVGKLDVSLEKLPEEASSLKKKKEWHHGDQTESSLFVAAKAAHFSEDLEEEIIDHKVISRTSHSDSSLYNRRQGNKSSEMDHVSHGRLRPGDMEERKNRLLIRKVSSFGEAMLQGHHGAHSDSLVHFAQQQDLVYFILFLWLLVYCLLLFPQLDIKKL

SEQ ID NO: 243 - DNA, 685 bp, Macropus eugenii
ctcttcctcctggcttccagcttctacaaaggtaccgtgccccgcctgggccgggtctgcttggacgtggccatcgtcttcgtcatctatgatgaagtggtcaaacttctcaacaaagtgtggaagacagactgaagcggggctactgctgctcagccctgaggcccaggagccggcggaggagagatcagcaggcggaggagaggccagcgggtggaggagagaccagcgctgtgttggggtgggccctcaggcccccccgcccaacctgtccccaagagccccatccctgccagggcccatggcagatgggggactgtgagcctaggcttcccagggaagggcctcccctggccctccctcccacccccactgtgagtagagcagaggtttggctgggccggcctttatgcaccaaccctttggcctcctcccctcaggccccactatcttctgagatcccagggcagagtcaagctcccccctctgcctctaggctcttatgattccagtgtgatttgtgccaaacagatcttgtcctgtgttttctatgttgtatctgtattctgtgctacatgttttgtgtgtatccttgtgtctgtctagtgtgtgtgtgtgtgtgtgtgtgcgagtccactgccggctctaccctatctaccaaaccaccaataaccccgtgcctttt

SEQ ID NO: 244 - protein, 44 aa, Macropus eugenii
LFLLASSFYKGTVPRLGRVCLDVAIVFVIYDEVVKLLNKVWKTD

SEQ ID NO: 245 - DNA, 713 bp, Macropus eugenii
cagagtgttaccgtagatttgaagtattttgtgggtacccacttaaagacatagttcatgactctgcattgatgagtttatttttccaggtaggcagatgccacattagctcaaagcaaaagatatttaatcaaagtgagaaaggaaaaagttctcttaagtacacagagggcatgttcttctacaggtgtgtcacacctgcaaagaacaggtattgggggtggcacacatgcctacatggctaggaatcttgcatggagagcacactaataaggatccagacgtcagggacacatgcaaagctgggacaactgacacttccaacactaccaagagtacagatgtcatctggtgatgttattactcgactttttgctaggtatcctgtctctgggctgatgtcacatcatcactttcaagttgtctcttctgggtgtgttctgtggcctcttgttcaccaagctgttatcttttaccatcttccgggtttcagaaatctggcctcttcagggctggctgctgttctctactgtccatgtctgaaatgcaatagttagaaagcctctccctgactctaagctatatttctattcatgcacagtctgcggcaaattacagccaaaacagacagatgaggcagcagccaacagaagctcacagaatacttccagctgatgcggtctgttatttttattatttacttctcaggttgg

SEQ ID NO: 246 - protein, 68 aa, Macropus eugenii
  misc_feature (5)..(5): Xaa can be any naturally occurring amino acid
  misc_feature (26)..(26): Xaa can be any naturally occurring amino acid
MVKDXQLGEQEATEHTQKRQLESDDXDISPETGYLAKSRVITSPDDICTLGSVGSVSCPSFACVPDVW

SEQ ID NO: 247 - DNA, 719 bp, Macropus eugenii
  misc_feature (670)..(670): n is a, c, g, or t
tgcgtcctagcgggcaagatgtcggcttcgcgggtgccggagctgaagcagatcagccgcggggaggctatgcgtctcgggcccggctggagccactcttgccacgccatgctctacgcagccaatcccgggcagttgttcgggcggatccccatgcgcttctcggttctggtgctgggcctggtccgggttcccctgtacacccagaaggatcgagttggtgggttccccaacttccttagcaatgccttcatcagcaccgccaagcaccagctgctctttgccctgaaggtgctgaatatgatgcccgaggacaagctggctgaggccttggctgctgctactgagaaacagaaaaaagccttggagcaacagcagactgcttcctcctgaagccaccctccccatccctggggctgggttttctctccctgtctctttccctgccccgtcttttatccacattttctatgctccaggggctgagaaaagacttgagataattctacattccacagaggtgtggggtctctccctgcttcccccccatgcctgaaaaggagtgcatttcattcctgccttcgacctctgtgtagtccttttctttgacctggctgcaaagcagcagtggcggagccgcagcctgggctggcacttcaggttggtgtanaggggtgcgagaggagcagcacctgcccgaggtttggagtgacccgttt

SEQ ID NO: 248 - protein, 130 aa, Macropus eugenii
CVLAGKMSASRVPELKQISRGEAMRLGPGWSHSCHAMLYAANPGQLFGRIPMRFSVLVLGLVRVPLYTQKDRVGGFPNFLSNAFISTAKHQLLFALKVLNMMPEDKLAEALAAATEKQKKALEQQQTASS

SEQ ID NO: 249 - DNA, 710 bp, Macropus eugenii
  misc_feature (699)..(699): n is a, c, g, or t
tctggccttgctaaacctggcctgtatgatgattattactttcttgccatacacgttttccttaatggcctcctttcctgatgtgcctttgggtattttcctgttttgcatttgtgtcattgccattggcctcagtcaggcagcaattgtgacctatgggttccattacccatacttactgaatcgccagatccgacagtcagagaacaaggccttctacaagcaccatatcttaaatattatactcagggggccagccctgtgcttttttgcggccatcttctcctttttcttttttcctgtgtcttacctccttcttggccttgtcatcttcctcccctacatcaatagattcatcacgtggtgcagagacaaacttgttggtaccaaatcagaagagcaacctcagagcttagagttttttacttttaatatccatgaacccctaagtaaggagcgagtagaagccttcagtgatggtgtgtatgccattgtagcaaccctcctcatcctggacatttgtgaggataatgttcctgatgccaaagaagttaaagaaaaatttcatggtgaccttgttgaagcactgagagaatatggaccaaacttcctgccctattttgcgctcctttgtaaccattggtctcctgtggcttgtccaccactccctctttcttcatgtgagaaagacaacccagntcatgggcctg

SEQ ID NO: 250 - protein, 237 aa, Macropus eugenii
  misc_feature (233)..(233): Xaa can be any naturally occurring amino acid
  misc_feature (237)..(237): Xaa can be any naturally occurring amino acid
SGLAKPGLYDDYYFLAITFSLMASFPDVPLGIFLFCICVIAIGLSQAAIVTYGFHYPYLLNRQIRQSENKAFYKHHILNIILRGPALCFFAAIFSFFFFPVSYLLLGLVIFLPYINRFITWCRDKLVGTKSEEQPQSLEFFTFNIHEPLSKERVEAFSDGVYAIVATLLILDICEDNVPDAKEVKEKFHGDLVEALREYGPNFLPYFALLCNHWSPVACPPLPLSSCEKDNPXHGPX

SEQ ID NO: 251 - DNA, 710 bp, Macropus eugenii
cctcagctttaatgatctggaaaggactcatggtagtaactggaagtgaaagcccaattgtagtggtactcagtggaagcatggaacctgcatttcacagaggggatcttctctttttaaccaatcgaattgaagatcccataagagtaggagagattgttgtctttaagatagaaggaagggaaattccaattgttcaccgagtcttgaaaattcacgaaaggcaagatggacacgtcaagtttttgaccaaaggagacaataatgctgttgatgatcgagggctatataagcaagggcagctctggctagagaaaaaggatgtagtaggacgagcaagaggatttgttccatatattggaattgtgacgattcttatgaatgactatcctaaatttaagtatgcagtcctctttttattgggtttatttgtgctggtccatcgggagtaagatgtctgccttatagctcctgaggaagatgctatgctttttgttacaaaatgtttggagcagttcctggtctgtgaaagtggaagcaaaaaatgcagatttcaatgcttcttggtcgaatcgatttggattagtttatgtttccactgcagagtgtgggtgactgtgtgggtgggtgcatgtgtgcctgtgtgcacacacatagggaatttcagccacaggttttcatatgttctcatgtcacattttagcgttttt

SEQ ID NO: 252 - protein, 149 aa, Macropus eugenii
SALMIWKGLMVVTGSESPIVVVLSGSMEPAFHRGDLLFLTNRIEDPIRVGEIVVFKIEGREIPIVHRVLKIHERQDGHVKFLTKGDNNAVDDRGLYKQGQLWLEKKDVVGRARGFVPYIGIVTILMNDYPKFKYAVLFLLGLFVLVHRE

SEQ ID NO: 253 - DNA, 716 bp, Macropus eugenii
caagcccccagccaaggcagtcaagccttcccccaaggcagctcagcctaagaaagctgaaagctccagctctgactccgactctgactccgactccagctcagaggacgaagctacgaagaaacagaaaacaaagactccagttaagaccccagttaagactccagttaagacttcagtcaaggccacagctaagactccagtcaagactcctgctaagtcaggcacagctgcccaggtcacccctaaattagccaatggcaaagctggtgaaagcagcagtactagtagtagtagcagcagcagcagcagcagtagtgactcagaggaggaagcagaggtggcagcagctccgtccaaaaaggctgtactgaagaagccaactccatccaagacccctgtgaaagctgcccagaagagttccagcagtgaagaatcctccagtgaggaagaagaagaagagaaacagaagaaaaaacctctcaaggctaagcaaggtccatacagctctgtgcccccacctccttgtacccagtcaaagaaggtgggaggggaccaacctcccaagaagaaggtgggaggggaccagtcctccaagaagttagcaggtgaccagccccccaagaagaggtggcaggtgaccaggccaccaagaaggaggaaagcagtgactcttctgatagcagtgaggacagcagtgatgaggaggcagccac

SEQ ID NO: 254 - protein, 239 aa, Macropus eugenii
  misc_feature (209)..(209): Xaa can be any naturally occurring amino acid
KPPAKAVKPSPKAAQPKKAESSSSDSDSDSDSSSEDEATKKQKTKTPVKTPVKTPVKTSVKATAKTPVKTPAKSGTAAQVTPKLANGKAGESSSTSSSSSSSSSSSDSEEEAEVAAAPSKKAVLKKPTPSKTPVKAAQKSSSSEESSSEEEEEEKQKKKPLKAKQGPYSSVPPPPCTQSKKVGGDQPPKKKVGGDQSSKKLAGDQPPKXEVAGDQATKKEESSDSSDSSEDSSDEEAAT

SEQ ID NO: 255 - DNA, 715 bp, Macropus eugenii
ggatcaggaaccgttcccttctgagccaggaaatgcagaaacgagatgtgtcattaacaatttgccttgtggaaaggtggcctttgagtaatggatgattgggtaggtttgctttttccagggctaatattccaaaaacctcagtctgtttgtgtttcagatatgaaaacctggttgtagctttggctgaaaatacaggtcctgacaactctgactatcaacagctcacaaaggctgctcagaagttgagtgaggtcacccagaaggttagtgctattggtcgagaacacgagaatggccggcagctccaacgtattcagactttactcagtggacgtcacgctaaaggactgaccaaagggcgctggttcctccggcagggctggctactagtggtcccccctaaaggggaaccaaagtctcggatgttcttcctcttctctgatgcacttttgatgaccaagcctcggtctgttctacatatcctgtatggagggacctttgtttgtcaggccctttaccccatggcccaatgtcaactccaaaggatctttggtcactcagggggatcagggggtggactgctcagtctttcttttccccatgaatagctgctgctcatgttcacggaccaagaagcactatcctgatggtaccacagtctgactgcagccatcagcagccacacaaggtagaagagcactttacagttgtt

SEQ ID NO: 256 - protein, 238 aa, Macropus eugenii
  misc_feature (29)..(29): Xaa can be any naturally occurring amino acid
  misc_feature (54)..(54): Xaa can be any naturally occurring amino acid
DQEPFPSEPGNAETRCVINNLPCGKVAFXVMDDWVGLLFPGLIFQKPQSVCVSXYENLVVALAENTGPDNSDYQQLTKAAQKLSEVTQKVSAIGREHENGRQLQRIQTLLSGRHAKGLTKGRWFLRQGWLLVVPPKGEPKSRMFFLFSDALLMTKPRSVLHILYGGTFVCQALYPMANVNSKGSLVTQGDQGVDCSVFLFPMKAAAHVHGPRSTILMVPQSDCSHQQPHKVEEHFTVV

SEQ ID NO: 257 - DNA, 729 bp, Macropus eugenii
  misc_feature (652)..(652): n is a, c, g, or t
gagtagtggaggtattgttcctgagtgtgccctagctcccagtttgtaactatgatacctcccacactcaccctcaccagacgccttatatgtctagctccctgtcctggctatgcaaaggggaccagtggcctgttcactaaccctccccctttacctcctccctccagtatctcctctcctgccttctgggtaggtgctgccaatcatttgattttctcctgttccactgtgaactcccccaaacaccttcacctttcttttcagagcccttgaagggatgggaccccagtgtgctaaccagcaagaaactgatctgtttcccaggctatgttactgactaggggaaggcagagtgaggcagagaaggggctgagccttttcatcaaagggagtacttctcattgaatgctccccagggcaatcatcccctccaggtctctgtattacaggtatatcaatcagcaggtctctcctgggtgcaccccatcctctatgtgcccagcctagcaaggaaacaggggagctcagacaggttaagaacttacaacccatcaggacaaccaagaactgattaattgatatacttcaagagtcctaacgataggatgaatagaagttcagagaaccctagaactccaagggaccttangcacttccccacccctctatcctctgtccacaaagagaagatagttggaaagaatctggtgtcctgtgtgcaaatcc

SEQ ID NO: 258 - protein, 41 aa, Macropus eugenii
  misc_feature (15)..(15): Xaa can be any naturally occurring amino acid
  misc_feature (41)..(41): Xaa can be any naturally occurring amino acid
MNRSSENPRTPRDLXHFPTPLSSVHKEKIVGKNLVSCVQIX

SEQ ID NO: 259 - DNA, 806 bp, Macropus eugenii
gtttttttttttttttttttttttgagggggggtggtttggaggggagggaggaggttgccccaccaccaaccacaacacaacaaccccccaccccccccacacccaccccaccacccccacacacactatttccttttcttctccccacttatcacttcacttactccccctcattctctacctacatctcctaccccacttatcttttttcttttatactactcttcaattcttcctttattttttcttctctttattttttcttctaattttttttttatttttctctatttatatattctcttttattttcatatcttttatacattatttatctccttttttttctatctccatgcctattttttcctattcttccttatcttttctctctatttttttattcttcttccttgttttactctgtctattcttgctctctacagttatctattttatgtttttttatttcattgattatgttgtatgctcttacattctgattcgctcactctcttgcctcccttttatttcccgtgatcctttcttcgttctctttattatttatattttttgtgttttcgagttctttttatcttttatctctctttatatctttcgatctctgtcgtctcctcgtattgttttttctttagcgtcccattactgatctctatattttattctacttattctctgctctctttttcatcttctgctcagactgcgtgttgtagcgctatgagaggatttaccccaccgctcctctccccgtctctgttgtccgattctctgtcattatgg

SEQ ID NO: 260 - protein, 38 aa, Macropus eugenii
HNDRESDNRDGERSGGVNPLKRYNTQSEQKMKKRAENK

SEQ ID NO: 261 - DNA, 731 bp, Macropus eugenii
  misc_feature (723)..(724): n is a, c, g, or t
gtaggagggggtgtcagggatagaacccaggagacttgaatcccagcccaatgccctctgccccagataccatccatcttgggggtggggtagggaatgagggaggcacaagacttcagggtagaggaggaggaggaggcagcatgatgtggtagaaagacttctaggctaggagtcagaagaccatgattccaatcagccttcttccatgaagacatagagtgagcctgagcaaatcctttcccttctttggatctgtttgtctgcaaaatgaaggggttggactaaataatctctaggatctctttcagttctaatgaaactaggcattaatcccctttagtctttcttcagggagaaccctatgctttcccttcgctgaaaaatttcatatctaagtctcagatcctcctagttcctcctctctttaataaggagagggctggaggtggagttagctttgagcgtctgaaaaaaatctctctaatgcaactcaaaccccatgatgactggttgtcttaaccaatattaatgatggccctggcccctcagaggcaacttcttctccttgctaggttctccctctgtccccacaagcctttctgtgtcaggctctctttccacctggctattgccctctgcttactggtaatgaccatgtgttgttgcttagccctaaccattgttctccctctttagcttcccagccctttctgaaaccgnngagcctg

SEQ ID NO: 262 - protein, 66 aa, Macropus eugenii
  misc_feature (3)..(3): Xaa can be any naturally occurring amino acid
RLXGFRKGWEAKEGEQWLGLSNNTWSLPEAEGNSQVEREPDTERLVGTEGEPSKEKKLPLRGQGHH

SEQ ID NO: 263 - DNA, 738 bp, Macropus eugenii
ccctttccctcagagagctgtaaattgatgctaattgttcctttctcagttggcggcattaactttagtctcattgaggagagggagaaaaggcaagatgacctatttacaatgtctagtgaatgaactgccttaccccaatgaggatgactcccagaaccctgattgttctcccgagtgtaaaatctgtacatactctcctgaatgacatgcatcctctcctcacctgtcttgtctccagtggctgctattgctaagaaagtggatggtgtttaaattcttgtactgtataaaagacatttctctgatatcatttaggctgcagtccttctcctcttgaacctagacaacccaactttagctaatgcaatatacgtggtcactgacggagccttttccactccactctttgtcactgcagacttgcagcttgtgtcctgctcacccctgggttactcctgttcattctctctacagtagctccttgttggccttcttctggtggcaaaattgcattgatgtctgattgattcagtctcacagcgtaactgatttaaacaaaaaaccttgtgtgtcttaatcctcaaagagggttcccatgtactcaatcacccttttgtctggtatttgacaatcgaggcgtggcctcctctttcacgctgtctctcaacccaaaaccgtgaattcttctgtagacccttgccaccactgctgacactgaataacacttgtatgcat

SEQ ID NO: 264 - protein, 126 aa, Macropus eugenii
  misc_feature (45)..(45): Xaa can be any naturally occurring amino acid
MHTSVIQCQQWWQGSTEEFTGFGLRDSVKEEATPRLSNTRQKGDXSTWEPSLRIKTHKVFCLNQLPVRLNQSDINAILPPEEGQQGATVERMNRSNPGGAGHKLQVCSDKEWSGKGSVSDHVYCIS

SEQ ID NO: 265 - DNA, 754 bp, Macropus eugenii
  misc_feature (678)..(678): n is a, c, g, or t
  misc_feature (700)..(700): n is a, c, g, or t
  misc_feature (741)..(741): n is a, c, g, or t
gcctctatgagcaccttgagagcattttgttctgctgagacaaatcagtggggattttttttgtttggttttcatcaaataatagacacagaagtatatgcattttgaattcctgtctattacgccacagtaaagacacgatctattagagaaagtgatctacaatgtctacctgttgtagtcttgagttttcttggaggatatactcaacgtgaactatgaccattatcatacagactttgtaggaatgagaaaacttgtgtagcttggccattactgatgggtttggccacttttttgctagtagtactttctgtgatctttttcactctttttggcatcttagtcttgaaaactgacccttaagatcatgatgcctctagcataatgctttctatatgttgttgttatttcagtcatgtccaactctctgtgacctcatttttgggttttcttggcaaagatactggtttgctatttccttctgcagctcattttatggatgaggaaactggggcaaacaggactaagcaacttgcccagggttacccagctagtaagtgtctgaggctcaatttgaactcaggaagacatcttcctaactccagatttggtgctttgtgcactatagagcagccttcttctgtatattcaaccaaatccacctacctttctttntgtgtatatcattaccactttntcaccaaggcatagtacatggggtactaaagtgggagagtncaaataggatggt

SEQ ID NO: 266 - protein, 44 aa, Macropus eugenii
MPKRVKKITESTTSKKVAKPISNGQATQVFSFLQSLYDNGHSSR

SEQ ID NO: 267 - DNA, 716 bp, Macropus eugenii
  misc_feature (639)..(639): n is a, c, g, or t
gtgattgatgagatcatcagcttggagtccagttacaatgatgagatgcttggctacctgcctggaggccctgggggactgcagctcccaagcacactgcccgtttctgggaacctgctggatgtgtacagtggccccagtgccgtgaccccagctgtccctgtcagcaactcctgccctgctgagctgaccagtatcaagcaggagatttccgagaacgaggcaaaggcccttctgaaggagcgtcagaagaaggacaatcacaaccttattgagcggcggagacggtttaacatcaatgaccggatcaaggagctgggcaccctgatccccaagtccagtgacccggaaattcgactgaacaagggaaccatactgaaggcctcagtggactatatccgcaaactccagaaagagcagcagagagccaaggacctggagaaccgccagcgggtgctggagcaagcgaaccgaagcctgcagctcagggtccaggagctggatctccaagcccagatccacggtctgcccttgtacactgcccctaaggccgagccagctgagtgtggtggcccgcaacccctgccacccccgcctgaagctctactggatctgcactttcccggggatcccctcggngagctgtccaagatacctccagctcggactgaagacattatgatggaagaggacgaggacgatgtacatgaagccct

SEQ ID NO: 268 - protein, 239 aa, Macropus eugenii
  misc_feature (213)..(213): Xaa can be any naturally occurring amino acid
VIDEIISLESSYNDEMLGYLPGGPGGLQLPSTLPVSGNLLDVYSGPSAVTPAVPVSNSCPAELTSIKQEISENEAKALLKERQKKDNHNLIERRRRFNINDRIKELGTLIPKSSDPEIRLNKGTILKASVDYIRKLQKEQQRAKDLENRQRVLEQANRSLQLRVQELDLQAQIHGLPLYTAPKASQLSVVARNPCHPRLKLYWICTFPGIPSXELSKIPPARTEDIMMEEDEDDVHEAL

SEQ ID NO: 269 - DNA, 725 bp, Macropus eugenii
  misc_feature (609)..(609): n is a, c, g, or t
ccgaagtaccattgtcacctttcttcagcattatcccactcagctggtgactaactttctccttccactttaggggccatttaccagaatggtacactaaggcatttgggcatttgtgtgtagccgaagtggtaaagatcagagattctttcagtcgttcaagtttggatcccaaagatgggaagtccaggtgacaacacacccgcaggccaagactgcatctgactcaggaccaacaagggttttgtttctagacaaataggccaaccctggacaggatggatcaaaccacaaagctgggcagtgatccctcaatagatgcatcaaaagagctgatcttgactggaacacatggccctgtggaagcacatctgttgtaccatgttgagattgcttctgagaagcaggactcttgggggagaagatgaaaagactccttctcctgggctgttgcccttgactggctccaagctggaggacaggcagagccgtagcagtaggcatgtttggatgggggtggggggcatttctcttcaatgccagcaatgaaaagtgagtttgtgtagagatgtgtgtatgagtaagtgtccatgactgaatgtggaacanatgcagagagtgggcttcatgaggctggcaggccactggaatgggtgagacctttccattgcattatctctgacccctccaggggccaatgagtagtaaccctcatgcctcagggg

SEQ ID NO: 270 - protein, 242 aa, Macropus eugenii
  misc_feature (39)..(39): Xaa can be any naturally occurring amino acid
  misc_feature (170)..(170): Xaa can be any naturally occurring amino acid
  misc_feature (242)..(242): Xaa can be any naturally occurring amino acid
PLRHEGYYSLAPGGVRDNAMERSHPFQWPASLMKPISAXVPHSVMDTYSYTHLYTNSLFIAGIEEKCPPPPSKHAYCYGSACPPAWSQSRATAQEKESFHLLPQESCFSEAISTWYNRCASTGPCVPVKISSFDASIEGSLPSFVFDPSCPGLAYLSRNKTLVGPESDAXLGLRVCCHLDFPSLGSKLERLKESLIFTTSATHKCPNALVYHSGKWPLKWKEKVSHQLSGIMLKKGDNGTSX

SEQ ID NO: 271 - DNA, 705 bp, Macropus eugenii
  misc_feature (645)..(645): n is a, c, g, or t
ggcagatatctctggggacacccagaaagccaagcagtttctgcctttcctccagcgagctggtcgttctgaagctgtggtggaatatgttttcagtggttctcgcctcaaactctacttgccaaaggaaacctgcctcattaccttcctacttgcaggcattgaatgtccccgtggagcccggaacctccctggcctggtacaggagagagaacccttcagtgaggaagcaacactcttcaccaaggagttggtactacagcgagaggtggaggtggaggtagagagcatggataaggctgggaacttcatcggctggctgcacatcgatggtgccaacctgtcagtctcactggtggagcacgcactatccaaggttcatttcactgctgagcgtagctcctactacaagtctttgctgtctgcagaacaagctgccaaacaaaagaaagagaaggtgtgggctcattatgaggagcagcccatggaagaggtatccccagtgctagaagaaaaagagcgttcagccagctacaagcctgtgtttgtgacagagatcactgatgacctgcacttctatgtccaggacgtggagacgggtacacagctagaaaagttgatggaaggcatgagaaatgacatcgncagccacccacccgtagagggatcctatgcccctcggcgaggagaattctgcattgccaa

SEQ ID NO: 272 - protein, 235 aa, Macropus eugenii
  misc_feature (215)..(215): Xaa can be any naturally occurring amino acid
  misc_feature (235)..(235): Xaa can be any naturally occurring amino acid
ADISGDTQKAKQFLPFLQRAGRSEAVVEYVFSGSRLKLYLPKETCLITFLLAGIECPRGARNLPGLVQEREPFSEEATLFTKELVLQREVEVEVESMDKAGNFIGWLHIDGANLSVSLVEHALSKVHFTAERSSYYKSLLSAEQAAKQKKEKVWAHYEEQPMEEVSPVLEEKERSASYKPVFVTEITDDLHFYVQDVETGTQLEKLMEGMRNDIXSHPPVEGSYAPRRGEFCIAX

SEQ ID NO: 273 - DNA, 727 bp, Macropus eugenii
cggaaaaaaagaataagcaggagaaagaacggaataaaaagaagaaagggagcaaaacagagcatgatggatatctgaaacccacttcaaagcttttcacacaaagttccaagaaatcgttgactgatctgctggaattttttgaagggaaaaggcggctccttctcatcaccgcacctaaggttgagaacaatatgtatgtgcagcagcgggacgaatacctggagagtttctgcaaaatggcaaccagaaaaatctctgtgattactatctttggtcccatcaacaacagcaccatgaaaattgaccacttccagctagataatgagaaacccatgaaggtgctagatgatgaagacttagtagatcagcatctcatcagtgaactgaggaaggagtatggaatgacctacaatgacttcttcatggtgctaactgatgttgacatgagagtcaagcaatactatgaggttcccatagcaatgaagtctatttttgatttgattgacactttccagtctcgaatcaaagatatggaaagacagacgaaggagggcattgtctgcaaggaggacaagaagcagtcactggagaacttcctatctagattccgttggaggaggcgtttacttgtgatctctgctcctaatgatgaagactgggcatattcacagcagctctctgctctcagtgaacacgcttgtaattttggtctgcgccacatact

SEQ ID NO: 274 - protein, 242 aa, Macropus eugenii
EKKNKQEKERNKKKKGSKTEHDGYLKPTSKLFTQSSKKSLTDLLEFFEGKRRLLLITAPKVENNMYVQQRDEYLESFCKMATRKISVITIFGPINNSTMKIDHFQLDNEKPMKVLDDEDLVDQHLISELRKEYGMTYNDFFMVLTDVDMRVKQYYEVPIAMKSIFDLIDTFQSRIKDMERQTKEGIVCKEDKKQSLENFLSRFRWRRRLLVISAPNDEDWAYSQQLSALSEHACNFGLRHIL

SEQ ID NO: 275 - DNA, 757 bp, Macropus eugenii
gagcgaaataccatttgcaaaaggtgcccagatggatttttctcagatgagacttcctctaaagcaccatgcaggaaacacacagattgcagtgcccttggtttccaaatggcatcaaaaggaaatgcaactcatgacagtctctgcgctggaaagacagaagcaactcagaaatgtggaatagatgtcaccctatgcgaagaggcattcttcagatttgctgttcctacaaagtttaccccaaattggctcagtgttctggtggacagtctgcctggtaccaaggtgaatgcagaaaccatagaaaggattaaacgaaggcacagttctcaagagcaaaccttccagctgctcaagttatggaaacaccaaaacaaagaccaggatatggttaagaagattattcaagatattgacctctgtgaaaacagtgtggtgaaacacattggacgctgcaaccttaccctggaacagtttcgtagccctgatggaaagtttacctggcaagaaagtaggaatggcagatgttgtaaaaacgttgcacccatgccaattaacctgttctagatctaaagtcgttcaagctcgtggtgaattaaaacctgctctcttagatttccttctaggcttctgccctattgttctgtcaactcctctcaaccgctcgttcttctcccaatctcatctttctcacagtctctacgtcacctctctccgcttctctcctctctgtcctctacctgctgcccgatcctct

SEQ ID NO: 276 - protein, 252 aa, Macropus eugenii
ERNTICKRCPDGFFSDETSSKAPCRKHTDCSALGFQMASKGNATHDSLCAGKTEATQKCGIDVTLCEEAFFRFAVPTKFTPNWLSVLVDSLPGTKVNAETIERIKRRHSSQEQTFQLLKLWKHQNKDQDMVKKIIQDIDLCENSVVKHIGRCNLTLEQFVALMESLPGKKVGMADVVKTLHPCQLTCSRSKVVQARGELKPALLDFLLGFCPIVLSTPLNRSFFSQSHLSHSLYVTSLRFSPLCPLPAARSS

SEQ ID NO: 277 - DNA, 717 bp, Macropus eugenii
ccgccccaggccggccggaagtgacgctaggctggggttgccggaagaagtggcgaagttacttttcgcggggcgaacccgggggagcggcttggaggcggccggcgcgggcagtgggcacggggcagagggggtgaaggagacgggagacgcctttagggcagacgctgagaggagcctcccgggccggagcccaaactgtggcgtgcgcagccatgagctgggctctcctgcggtgacccaccatggcttcccctggcaccctcggcccccctgcagccccggcccccgccccgggaggtgatgataatggggcttccactacaacgtgctcagctgtgagggctgcaaaggctttttccggcgcagcgtggtgcggggcggtgcccagcgctacacttgtcgtgggggtggggcttgccacatgaatgccatcatgcgtcgcaagtgccaggagtgccgcctgcgcaagtgccgtgaggcgggcatgcgggagcagtgtgtcttgtctgaggagcagattcgcaagaaaaagattcagaaacaccagcccgtggggccagcgcagggctcaggggccccggctgctcctagggctcccatccctgggcctgcgggctccccaaccacatcctcagaagtgggagggccaggccctgccgatggcactggtgtccagctcacacctgaccagaagatcatgatccagcagcttgt

SEQ ID NO: 278 - protein, 157 aa, Macropus eugenii
MASPGTLAPLQPRPPPREVMKWGFHYNVLSCEGCKGFFRRSVVRGGAQRYTCRGGGACHMNAIMRRKCQECRLRKCREAGMREQCVLSEEQIRKKKIQKHQPVGPAQGSGAPAAPRAPIPGPAGSPTTSSEVGGPGPADGTGVQLTPDQKIMIQQLV

SEQ ID NO: 279 - DNA, 727 bp, Macropus eugenii
  misc_feature (540)..(540): n is a, c, g, or t
ccagaaacgtcctgagcaaggttccaatctccaaatcgagggatgtgagagaaaggagcaggaactggcagtagaggagagaggctctggcttgcacctgctgctatatgcactaaatattttccatatactctcctccccatgatgacgtgtgttgggaatcactctgtccttatagcagattaaacagatttaaccaaagaaacgatttaaaactgaaggtgaaagataggggagagagagagagagagagacttataaaggatatccggtgaaaatcctggctttaatatttactagttatgcactttctgagcctctttccctatttaatacttaactctggagttattatgagtatcaaataaaatcatacgtgtaaagcattaaataaatacgtaccattgccaggcttaactttttctagcccctaaatcacgttagtcaactagcaagtatctactgcataccatgctctatggtagttctagccattccagaatttgatcatatacttgacatggctgaggtaggctacancggacatactctgatacaaccttccaccctcggaatccaggttttggaggactgcggcaggcacgctctctggcctactgcgatttatttgatcataactcattaattcacactccacattacctaccctatttccctgaacgcctcattcatcttctcaaacaatcatcctcattttaacacccca

SEQ ID NO: 280 - protein, 48 aa, Macropus eugenii
MGRRVYGKYLVHIAAGASQSLSPLLPVPAPFSHIPRFGDWNLAQDVSG

SEQ ID NO: 281 - DNA, 729 bp, Macropus eugenii
  misc_feature (545)..(545): n is a, c, g, or t
  misc_feature (596)..(596): n is a, c, g, or t
  misc_feature (678)..(678): n is a, c, g, or t
  misc_feature (726)..(726): n is a, c, g, or t
cctcttcgatcctcttgggtcatgacctgtgcctatgcgccctcagggaattttgtggcttgtggggggctagacaacatctgctccatctacagtctcaaaacccgagagggcaatgtcagggtcagcagagagctgccaggccacactggatacctgtcctgctgccgcttcttagatgacaaccagatcatcactagctctggagataccacctgtgccctgtgggatatagaaacaggacagcagacagtgggctttgcaggacacagtggggatgtaatgtccctgtctctggctccggatggccgaagtttcgtctctggtgcctgtgatgcttccatcaagctgtgggatgttcgggactccatgtgccggcaaacttttacaggccatgagtccgacatcaatgctgtggccttctttccaaatggctatgccttcaccacgggctccgatgatgccacatgccgcctctttgaccttcgggcagaccaggaactactcatgtactcacatgacaacatcatttgtggcatcacctncgttgccttctcccgcagtggccggctgctactggctggctatgatgactntaactgcaacatctgggatgccatgaaaggagatcgggcaggtgttcttgctggccatgacaaccgtgttagctgtcttggngtgactgatgatggcatggctgtggccacgggttcctgggactccttnctc

SEQ ID NO: 282 - protein, 243 aa, Macropus eugenii
  misc_feature (182)..(182): Xaa can be any naturally occurring amino acid
  misc_feature (199)..(199): Xaa can be any naturally occurring amino acid
  misc_feature (242)..(242): Xaa can be any naturally occurring amino acid
PLRSSWVMTCAYAPSGNFVACGGLDNICSIYSLKTREGNVRVSRELPGHTGYLSCCRFLDDNQIITSSGDTTCALWDIETGQQTVGFAGHSGDVMSLSLAPDGRSFVSGACDASIKLWDVRDSMCRQTFTGHESDINAVAFFPNGYAFTTGSDDATCRLFDLRADQELLMYSHDNIICGITXVAFSRSGRLLLAGYDDXNCNIWDAMKGDRAGVLAGHDNRVSCLGVTDDGMAVATGSWDSXL

SEQ ID NO: 283 - DNA, 707 bp, Macropus eugenii
gccagcagaactttgaggatccccacctccaagatttacatcagtgaaacaagcaccactacagtgcccaacacttctcctacagctgcctccgtcagcactgacatcaatggacaggctgtctttgaagcatgtaaaaccatcttagaaaggcttgaacccttcaaaaagaaaaatcccaatggatcctgggaagactgggtcaatgctgcctacatggaacgagtgagtttgtctgccacaggattttatagaacaccaaacctgggctacagctttgaaaccaattctggaaatcccttccactacttctcctatggtgtagcttgctctgaggttgagatagactgtttaacgggtgatcataagaacatccgcacagacattgtcatggatgttggaaccagcctgaatccagctatagatattggacaggtagaaggggcatttgtccaaggccttggcctctttactctggaggagctgcattattctcctgaagggagcctacatactcggggacccagcacctacaagattcctgcttttggcaacattcctactgagtttagagtatctcttctccgggactgtcctaataaaaaagccatctatgcctctaaggctgttggagagccccccctcttcctggcctcctccatcttctttgccatcaaggatgctatctctgcagcccgtgctcagct

SEQ ID NO: 284 - protein, 236 aa, Macropus eugenii
ASRTLRIPTSKIYISETSTTTVPNTSPTAASVSTDINGQAVFEACKTILERLEPFKKKNPNGSWEDWVNAAYMERVSLSATGFYRTPNLGYSFETNSGNPFHYFSYGVACSEVEIDCLTGDHKNIRTDIVMDVGTSLNPAIDIGQVEGAFVQGLGLFTLEELHYSPEGSLHTRGPSTYKIPAFGNIPTEFRVSLLRDCPNKKAIYASKAVGEPPLFLASSIFFAIKDAISAARAQL

SEQ ID NO: 285 - DNA, 720 bp, Macropus eugenii
  misc_feature (598)..(598): n is a, c, g, or t
ggaaagaagaataccctgaagatggctcgacacatccgcccagtccccaacagcagtgacaagcctaagctgccccaggattgccatcaactctttctgggtggagaacgccagagtggactattccaaattcagccccaaggttcttcacctttcctggtgaactgcaagatgactccagagggtggctggacggtgatccagagacgcctgaatggctcagtggattttcaccagccctgggaggcctacaagtcaggcttcggagaccctaatggggaattttggctgggtctggagaaggtacatcatatcactggagaccgaggaagtcgtcttgctgtacagctattagattgggagggcaatgcccagtctgtccagatccccttccacttgggaggagaggacacagcctatagcctgaaactcacaggaccagttgctggagagttgggtccagccacagaggatggactgtctttacccttctctacttgggaccgtgatcatgacctcaggacagatctgaactgtgccaagaacctgtctgggggctggtggttcagtacttgtggccattccaatctcaatgganagtattttcactcccttccccggcagcggcaccagaggaagcagggcatcttctggaagacttggcggggacgctactaccctctacaggccaccaccatgctaattcagcccacagagggt

SEQ ID NO: 286 - protein, 240 aa, Macropus eugenii
  misc_feature (200)..(200): Xaa can be any naturally occurring amino acid
GKKNTLKMARHIRPVPNSSDKPKLPQDCHQLFLGGERQSGLFQIQPQGSSPFLVNCKMTPEGGWTVIQRRLNGSVDFHQPWEAYKSGFGDPNGEFWLGLEKVHHITGDRGSRLAVQLLDWEGNAQSVQIPFHLGGEDTAYSLKLTGPVAGELGPATEDGLSLPFSTWDRDHDLRTDLNCAKNLSGGWWFSTCGHSNLNGXYFHSLPRQRHQRKQGIFWKTWRGRYYPLQATTMLIQPTEG

SEQ ID NO: 287 - DNA, 719 bp, Macropus eugenii
gctattctaatagtaccacctcccctcctggacttctgattggataaactgtcttttttctccttcctctctccccagattggaccctggccgcagccttggacctcagaatccgctcgggtccaagaggcacagaagtcgtcgagatggagcgaagttttgcaggccgccgggcgcttgtcaccggagcgggcaaaggcatcgggagggacactgccaaggcgctgtttgccagaggagctcaagtggtagcagtaagccggacccaggaggacctggacagcctggcccaggagtgcccaggaatagagactttatgtgtggatctgggagactgggaggccacagagcaggctctgagcaccatcggccctgtggatctattggtgaacaatgcaggtgtagcccttctacagcctttcctggaagtcactaaggaggcttgtgataggtcttttgatgtgaattatcggtcagtggtccaagtatcccagatcatctcccgggggttaatagcacggggagccccaggagctatcgtcaacgtctccagccaggcctcccaacgtgccctaaaggatcatgccatctactgctctacaaaaggtgccatggatatgctaaccaaagtgatggctctggagctgggaccccacaagatccgtgtgaacacggtgaatcctacagtggtgatgactgccatgggcaggggccactgg

SEQ ID NO: 288 - protein, 191 aa, Macropus eugenii
MERSFAGRRALVTGAGKGIGRDTAKALFARGAQVVAVSRTQEDLDSLAQECPGIETLCVDLGDWEATEQALSTIGPVDLLVNNAGVALLQPFLEVTKEACDRSFDVNYRSVVQVSQIISRGLIARGAPGAIVNVSSQASQRALKDHAIYCSTKGAMDMLTKVMALELGPHKIRVNTVNPTVVMTAMGRGHW

SEQ ID NO: 289 - DNA, 717 bp, Macropus eugenii
ctctccccctcccccccacgggcatcctcggtcacttcctgattcccgcttcctgcttcccagagttggggatccagagctgccgccggtccggtccgctgccctgcgcgagcggtacccacccgcccaccgacatgtcattccgcaacgtggtcagacagagcaagttccggcatgtctttggccagccagtcaagaatgaccagtgctatgaagatatccgggtgtcccgcgtcacctgggacagcaccttctgtgccgtgaaccccagattcctggcgatcattgtggaggccagcggtgggggggccttcatggtgctgcccctgagcaagacagggcgcattgacaaatcatatcccacagtatgtgggcacactggacccgtcctcgacatcgactggtgtccacacaatgatgaggtcatcgccagtggttctgaggactgcacggtcatggtctggcagatcccagagaatggcctagtggcgcccctgacagaacctgtggttgtccttgaaggccactctaagagagtgggcattgtgacctggcatccgacggcccggaacgttctcctcagtgcaggctgtgacaatgtggtgctcatctggaacgtgggcaccgcggaggagctgtaccgtctggatgacctccaccctgacctcatctacaacatctcctggaaccgcaatggaagcctcttctgttccgctt

SEQ ID NO: 290 - protein, 195 aa, Macropus eugenii
  misc_feature (192)..(192): Xaa can be any naturally occurring amino acid
  misc_feature (195)..(195): Xaa can be any naturally occurring amino acid
MSFRNVVRQSKFRHVFGQPVKNDQCYEDIRVSRVTWDSTFCAVNPRFLAIIVEASGGGAFMVLPLSKTGRIDKSYPTVCGHTGPVLDIDWCPHNDEVIASGSEDCTVMVWQIPENGLVAPLTEPVVVLEGHSKRVGIVTWHPTARNVLLSAGCDNVVLIWNVGTAEELYRLDDLHPDLIYNISWNRNGSLFXFRX

SEQ ID NO: 291 - DNA, 713 bp, Macropus eugenii
ggaaacctgaaatccatcaatacaagaatcaattgaaggacctaagtaattttagcctggaaaggagacttagtgaggatattgaatttgtcttcagattatctgtaagatcatcatagaaagaggcaataatcattttgtttggcccctgaaagcagaactttgaccaacaggaaaaaggaacagaaaggcagatctggattccttataaaaagacctgaattcaagtccagaatttgacacatcctaactgtgtgaagctgggcacatcacaacctctcaatgctgtaggcaccgcaaaactatcagtggcagaaaaggtgcaaatctgtatgagtagcaggagtttcctagcttggaagtatccatctatactccttcaaagaagatgcttctaagattagagttactcatccacgatggctgctttgggtgggtagtgacttacccatcactgacagtcttcagatacaggctggataaccacgttgttggggatgttggatttacttatctatatacatattgtacttcccctagtagaatgtaagttccttgagggcagggactatttcctttctaaggactgtaggacactgagctctgaatgtgaagtcgacaagagctgagttcaaatctagccttggacacttattagttgtgtgactctgagccagtcgcatagagctgcctcagtttcctcaattataaat

SEQ ID NO: 292 - protein, 160 aa, Macropus eugenii
  misc_feature (30)..(30): Xaa can be any naturally occurring amino acid
  misc_feature (55)..(55): Xaa can be any naturally occurring amino acid
  misc_feature (75)..(75): Xaa can be any naturally occurring amino acid
KPEIHQYKNQLKDLSNFSLERRLSEDIEFXLQIICKIIIERGNNHFVWPLKAELXTNRKKEQKGRSGFLIKRPEXQVQNLTHPNCVKLGTSQPLNAVGTAKLSVAEKVQICMSSRSFQLGSIHLYSFKEDASKIRVTHPRWLLWVGSDLPITDSLQIQAG

SEQ ID NO: 293 - DNA, 715 bp, Macropus eugenii
cgcccggcccccgctgggctctcggggcggggtggggccggggcatgcagggcacctcaaaactgcccaagggggtcctgctggccctgggcctgctcattacaatactgctgtacctgggcctgcccagtctcccccagcccctcatctggacctggaacagcgacaatgtcaccatcctggctgggcttacacacagcaactcttcgatcttttaccgggaggtccagccccttcacaaaccccacaggctggaggtggtgttactacatgggaaggccttcacttcacacatctggcagcagctggggacactggaaaagctgtcccgaaggggctatcgggccattgctctagatctccctggttttgggaactcattcccctcccctgcagcccgcacagaggctggacgggctgatctcctggatcaagtcctacaggacctgaaggtcaaaaagccagtgctggtcagcccctctctgagtggccactacgctctgcccttcctgatgcgggctcacgggcggcttaatggctttgtccccattgctcccaccttcaccgagaactacacacagaagcagttctcagacatcaagacacccacacttattctgtatggagctttagacaaaggcctggcccaggagtctctgcagaagctccgacaccttcccaccactcaacgtgaagctgcaggatgctggccacg

SEQ ID NO: 294 - protein, 224 aa, Macropus eugenii
  misc_feature (224)..(224): Xaa can be any naturally occurring amino acid
MQGTSKLPKGVLLALGLLITILLYLGLPSLPQPLIWTWNSDNVTILAGLTHSNSSIFYREVQPLHKPHRLEVVLLHGKAFTSHIWQQLGTLEKLSRRGYRAIALDLPGFGNSFPSPAARTEAGRADLLDQVLQDLKVKKPVLVSPSLSGHYALPFLMRAHGRLNGFVPIAPTFTENYTQKQFSDIKTPTLILYGALDKGLAQESLQKLHTFPPLNVKLQDAGHX

SEQ ID NO: 295 - DNA, 724 bp, Macropus eugenii
ccttacttgatggcaaagccaccctgacatttctaagtagaggagaagattacgtcatcacaatgccctatgcacattgcaaagggattttgtacggcaccatgacgatggagctgggtgggaaagtgaccatcgagtgtgggaagaataattaccaagcagaactggagtttaagctcaagcctttctttgggggcagctctggccttaaccagatctctgggaagattaagtcaggagaggaagttctagcaagcctcgatggacactgggacagggaggtgtacatcagtgacccaaagaacggtaccaccgatgtcttctggaacccaaccgcagacatccggaggcagaggctgaagcgccacattgtgctatttgaggagcagacggagctagaatcagagagactctggcagcacgtgaccagtgccatcaacaaaggtgaccaggtaaaggccacccaggagaagtctgtgctggaggaggagcagaggagaagggcccgagagaggcaggaggcctttctagactggaagccactgcttttccttcaggatcccagctcccaggagtggcactacaaatatgaggacctcaggccttgggaccccttagcagacattgcccagtttgagcaggatggccaattgcagacaatgggccgacgtgcacccctgaggctgaccactcggaacccagtggctcggcacaagaggtcaag

SEQ ID NO: 296 - protein, 208 aa, Macropus eugenii
  misc_feature (183)..(183): Xaa can be any naturally occurring amino acid
MTMELGGKVTIECGKNNYQAELEFKLKPFFGGSSGLNQISGKIKSGEEVLASLDGHWDREVYISDPKNGTTDVFWNPTADIRRQRLKRHIVLFEEQTELESERLWQHVTSAINKGDQVKATQEKSVLEEEQRRRARERQEAFLDWKPLLFLQDPSSQEWHYKYEDLRPWDPLADIAQFEQDGXIADNGPTCTPEADHSEPSGSAQEVK

SEQ ID NO: 297 - DNA, 724 bp, Macropus eugenii
cccaaggccaaggtgacgaagcaggaggggcccagagctgagacagggcagaaaggtgagtggacgtttctggcccccagcagcagcttgggtgaaatcctctgaaccctccagcctgtgtcacagaaagatgaagaagcagctggtggtggggctggtcctcctggtcattgcagtcattgtggccctggtcctggggctcagcctgcagcctcggggcagcccagagccttctcatgtctacaggagaggggccgtggcagctgatgcccagaagtgctccgagatcgggagggacgcgcttcaggatggcggctcagcggtggacgcagccattgcggctctcctctgcatggggctcatgaacccgcacagcatgggcattggcgggggtctctacttcaccatttacaatagcagcactggaaaagctgaagtcatcaacgcccgcgaggtggccccaaaactctcatctgtcaatatgttcaatacctcggagcagtcctcgagcggaggcctgtctgtggctgtccccggggagatccgtggctatgagctggcccaccagcggcatggcaagctgccctggtcccgtctgttacagcccagcatacagcctggcccgcgagggtttcccagtgggcaagggcctggcgaatgctctgattacgaggcgggagaccgttgagagcacgccagacctttggatcctgccgcagggaga

SEQ ID NO: 298 - protein, 241 aa, Macropus eugenii
  misc_feature (241)..(241): Xaa can be any naturally occurring amino acid
PKAKVTKQEGPRAETGQKGEWTFLAPSSSWVKSSEPSSLCHRKMKKQLVVGLVLLVIAVIVALVLGLSLQPRGSPEPSHVYRRGAVAADAQKCSEIGRDALQDGGSAVDAAIAALLCMGLMNPHSMGIGGGLYFTIYNSSTGKAEVINAREVAPKLSSVNMFNTSEQSSSGGLSVAVPGEIRGYELAHQRHGKLPWSRLLQPSISLAREGFPVGKGLANALITRRETVESTPDLWILPQGX

SEQ ID NO: 299 - DNA, 720 bp, Macropus eugenii
ccttggtatattatgaccagtggcaggacaatggagtctacaaaggagttcttctcgaagcacaagtactttggtttaaaaaaggagaatatcatcttttttcagcaaggaatgctacctgccatgcagtttgatggaagaattatcctggaagagaagagcaaagtggccatggctccagatgggaatggtggtctttaccgagcccttgctgcccatggcattgtggaagatatggagaaaaggggcatttggggaatccatgtctactgtgttgacaacatcttggtgaaagtagcagacccacgttttattggattttgtgttcaaaagggagcagactgtggagcaaaggttgtggagaagacaaatcctacggagcctgttggggtattgtgtcgagtggatggtgtctaccaggtagtggaatatagtgaaatctctttggccacagcccaaaggcgaagccccgatggacggctgctgttcaacgcagggaacattgccaatcatttcttcactgtgcctttcctgaaagatgtggtcaacatttatgaaccacagctgcagcaccacgtggctcagaagaagattccatatgtggatacccaggggcaactcgttaagccagacaaaccacatgggataaagatggaaaaatttgtcttcgacatctttcagtttgctaagaagtttgcggtatatgaagtattgagggat

SEQ ID NO: 300 - protein, 239 aa, Macropus eugenii
LVYYDQWQDNGVYKGVLLKHKYFGLKKENIIFFQQGMLPAMQFDGRIILEEKSKVAMAPDGNGGLYRALAAHGIVEDMEKRGIWGIHVYCVDNILVKVADPRFIGFCVQKGADCGAKVVEKTNPTEPVGVLCRVDGVYQVVEYSEISLATAQRRSPDGRLLFNAGNIANHFFTVPFLKDVVNIYEPQLQHHVAQKKIPYVDTQGQLVKPDKPHGIKMEKFVFDIFQFAKKFAVYEVLRD

SEQ ID NO: 301 - DNA, 724 bp, Macropus eugenii
catgatcaactgtgccccaaatcctgggcttggtgcagagtatggcttctcccattgtgcattcagaatacccatgaattcccttggtaacaaggcagctgggctttgtctggcctcccacctttgtcccttccataaaactaattctgcctggatcctttcatcatcccctcccccaatcaggattatgtgaccaaacgctatggctgttagtcccagtccattcaatggctgaaggtgaccccacaggaaaggttggaggattctgagtcccctgttgtcacaatgaagaggagaattgacactttgagttgtgattgaggatgcctttgtacaattgtcctcagtaaggggtgagagaggcaaaccttggagtctctctgtgctccatccttgctgaccctgaggtccttgaagcctgcagagactcttgctgtctctcaccaatatcagctactcttgcaacaggggctctatctggctctgtgcgtcaatcccacacatgaggccattcagcaaacaaaatctacatctgtgaccttgacactcaggggtacggacagagaatgcgagcaaagaggataggaaccaaacacaaagataccaaagtctttagacctggaaacaagaaagaattttggctcaactcagcaaataaaccagggctaagggactggctcctcaggtctcaggagcattcatgtccatccacagagaagtcaaa

SEQ ID NO: 302 - protein, 175 aa, Macropus eugenii
  misc_feature (57)..(57): Xaa can be any naturally occurring amino acid
  misc_feature (106)..(106): Xaa can be any naturally occurring amino acid
  misc_feature (175)..(175): Xaa can be any naturally occurring amino acid
MAVSPSPFNGLKVTPQERLEDSESPVVTMKRRIDTLIVIEDAFVQLSSVRGERGKPXESLCAPSLLTLRSLKPAETLAVSHQYQLLLQQGLYLALCVNPTHEAIQXNKIYICDLDTQGYGQRMRAKRIGTKHKDTKVFRPGNKKEFWLNSANKPGLRDWLLRSQEHSCPSTEKSX

SEQ ID NO: 303 - DNA, 720 bp, Macropus eugenii
gttcctccatccttcgtcccctccggtaggcaggcaggtcaggctgtctggctgtcagtggagttctggggctcagccccgccgccagcgggacctaggagctatgcagtccccgggagtaccgtttgcttggctcacgctacctctgcttgtccaggcggcccccgatggctcttggtgctatgattctcagaatccccaatgtggcccttcacattggaaggatgtagcccacacctgtgggggcacggctcaatcacccattgacattgactggcatcacgtgaagctggacccggacctgggcccttttgtatttgaaggatatgactcagcacccccaggcccctggcagctcctgaacgatggacacactgtgctgctgagcttgggcggggcttggggccaagaacagggccgagtgtgcatctggggagggggcctgccccacatctgctgtgctctgcagcttcacttccactggggcagccccacaggcaatggctctgaacacactttgaatggacagcgccagccgatggagatgcacatggtccacatgaacaccctctaccagagtctggaggaggcccggggccatcctggtggtttggctgtgttagcctttctattcaggtgcagattgaggacaacgtcaactacaacaccattgtgtctgggctgaagacatttctaccagggggagtctgtggaatggca

SEQ ID NO: 304 - protein, 185 aa, Macropus eugenii
  misc_feature (18)..(18): Xaa can be any naturally occurring amino acid
  misc_feature (152)..(152): Xaa can be any naturally occurring amino acid
  misc_feature (185)..(185): Xaa can be any naturally occurring amino acid
MALGAMILRIPNVALHIXKDVAHTCGGTAQSPIDIDWHHVKLDPDLGPFVFEGYDSAPPGPWQLLNDGHTVLLSLGGAWGQEQGRVCIWGGGLPHICCALQLHFHWGSPTGNGSEHTLNGQRQPMEMHMVHMNTLYQSLEEARGHPGGLAVXSLSIQVQIEDNVNYNTIVSGLKNFYQGESVEWX

SEQ ID NO: 305 - DNA, 724 bp, Macropus eugenii
tccagcctttctaagctgcttttgttgtcttcaccctcccaactaaactctctcttctttctctctttccaacgtctcactcctgtcttcagttctttacaacattccagtgttaccacctatccttggctgacacctttctgctcataggtgactggtcttcttgccaactgtgagcacctactattaaccccaaatatgcttcaagggcagctttatccctccttccttcccccaacagcattgattggaacggactagagtgcctcatattgtaattaatgaatgctcgggtgtaaccaattaatagcatggtaccgggtgggattcaaaaccagtggcttgttttggaacattgctttccttccccggtccccctggcactgcatgtgaatgtttttgcatgctcttccaatctagttagctgtgttctaataccacaaccaacctaccttcctcgaaggtactaactctgcctgactgagacagggccagtagagagatctccaccattgttcagaaaatgcctagctttttgagaagccttttttagaaatgtagaaacaaatttcccagctgaaaactagcttgaatgaaaaggcttttggtgtccttgaccaaaatcatgggtgacttttctgtagctgtattttatttcaactcatctatacgccagccaagaagtactctgtaatctgaagctgtgttaaagtaattgcagtcc

SEQ ID NO: 306 - protein, 18 aa, Macropus eugenii
TAITLTQLQITEYFLAGV

SEQ ID NO: 307 - DNA, 728 bp, Macropus eugenii
cccaggacccccaggacctattcggagctgccctaaactgctatctcgaccccggcccaggcaccgcaggaggggcgcgacctccactgctagccttttttagtaagctctgtgccaagggggacattccccagccgctgcgcactcttcctcgtttccgcctactcggcgatctgccccagctgctccgggccctgggcgccgaggactctcgaatagccccgcgttggcttgggctgtggccccggccccggcctccggagcgcaaagattggcagtgccatttgaggaaccgcctggagctgtgccaaaaactggagcgggaggcagcccaggtggagctgatcagctcagacagtggctgaattggaagggaataagagagagttgcttttgtcctccctcctagggggactgtgaagcccaacattatgggaagagaagcgagctaaggggaggccaaaagggtgtcctccccatcaccaagctggagccttcttctcagatgtgggcctccagcggagtgtgtgcaagggagcggggaggagagaagccttggaggggactgctctgaggatgcatagggtactccaaacatctgcctccccctcttccctgcaaaagcatttggtattcttacaactctggcgaggagcttgtattaaacttgtattaaagtgtcttgataggacatcagaggtagtttttaggattcctcgagtcccccc

SEQ ID NO: 308 - protein, 120 aa, Macropus eugenii
QDPQDLFGAALNCYLDPGPGTAGGARPPLLAFFSKLCAKGDIPQPLRTLPRFRLLGDLPQLLRALGAEDSRIAPRWLGLWPRPRPPERKDWQCHLRNRLELCQKLEREAAQVELISSDSG

SEQ ID NO: 309 - DNA, 726 bp, Macropus eugenii
ggccagcgacccagtacctgccctgctatgggcccaggaggtgggccagatggtggtgggccgaacccggaagctcttgctgcagtttggagtgctgttctgcaccattctcctcctcctctgggtctctgtcttcctttatggctccttctactattcctacatgcccgcagtcagccacctcagcccagtccacgtttcctacaggaccgactgtggttctgctggacccgttctctgctcctttcctgttgccaacgtctccctggtcaaaggtggacgtgatcgggtgctgatgtatggacaaccataccggatttccctggagttggagatgcctgagtccccagtgaaccaggagctgggcatgttcatggtcaccattgcttgctacacccgaggaggacgaattatctcctcttctgcccgctcagccatgctgcattaccgctctacgctgctgcgactgctggacacccttgtcttctcgggcctcttcttatctggctttgcagaacaaaagcagctcctggaagtagaattgtatgcagactaccgggaggactcgtacacgccaaccacaggagcagtgattgagatccacagcaaccgcattcagctctatggtgctcagcttcggatccacgcccacttcacagggctcaggtatctgctctacaattttcctatcacctcggctgtcattggcatcgccagcaccttact

SEQ ID NO: 310 - protein, 242 aa, Macropus eugenii
ASDPVPALLWAQEVGQMVVGRTRKLLLQFGVLFCTILLLLWVSVFLYGSFYYSYMPAVSHLSPVHVSYRTDCGSAGPVLCSFPVANVSLVKGGRDRVLMYGQPYRISLELEMPESPVNQELGMFMVTIACYTRGGRIISSSARSAMLHYRSTLLRLLDTLVFSGLFLSGFAEQKQLLEVELYADYREDSYTPTTGAVIEIHSNRIQLYGAQLRIHAHFTGLRYLLYNFPITSAVIGIASTLL

SEQ ID NO: 311 - DNA, 736 bp, Macropus eugenii
  misc_feature (729)..(729): n is a, c, g, or t
cgaggttgggtcctggaaggggcgattgccaaaggctgcggggctcacatcggatgcactctcagggctcctgcttccccttctgttttcacttggctgcactggtcaaaggagtggtggccatggtggggggcaggggcagcccacagcctgagctcccagctcccatagcagcagcctcccatcagcaatgggaaactcagaagtgcacacagcagaggacacacttttctgttgaagaatcatgccctcatgccctccttccagctccttgctgggggctggtgctgagtggccaccacagccgctgctggccgggagaagggggacggctttcaggtggtactttgaagctctcctgtcccccaacctcccactccacactactactctgtgatagaattcaggattttgcaatccaaagcctgcaacacattgaattgctcctgctgagggatccgtcacacactgaagtagaagcttgtttgtttgccttttttttaactgtcaagagacctacctccggtggttgacaactatgtgctacacacctacagtacatttctgggaaccgtcccagggccatggggcctctctctcagggggacggggctgctgcttatctagcagcaatgggctgaggaatcagcgctgcatgtttctgtctgctagacaatttgtataaccttagcatgtttgctaaattccttgtggaaaccaatatctggngggaaaa

SEQ ID NO: 312 - protein, 42 aa, Macropus eugenii
  misc_feature (4)..(4): Xaa can be any naturally occurring amino acid
MATXSFDQCSQVKTEGEAGALRVHPDVSPAAFGNRPFQDPTS

SEQ ID NO: 313 - DNA, 710 bp, Macropus eugenii
  misc_feature (648)..(648): n is a, c, g, or t
gacaaggagaaaaggaaattacttatgcaaaaccaatcttcaacaaatcatcctggagccagcattgccctttccaggcccccccttaataaagattttcgtgatcatgctgaacagcagcacattgctgcgcagcagaaggctgccttacagcatgctcatgcacattcttcgggatacttcataactcaggactctgcatttggaaatctcattcttcctgttttaccgcggcttgacccagaatgaaggagatatttgcattggggaaaacaactttgtaaaatgaactgccaaagttactgtcattccgattcactctgtgctaagaaatgactcacatttttttggtgagattttgtatttcatgccttgttgcaaggcactttacatctatgcaggtgaaatgtacataaatggtgcatgttatacaggctataaccattctgtaatgcacttcatttatttataccaacatgcctgaatgctttaattttttttttttttactcttaagtaggatgaaatatactatgagaccagactagaatttagaaaaattatgtaaggtatttaactttaaggaaatgccattttttcaccctaaacaaatgggattggccatagaaaacacacattcttggtgttntatcagactgttattagtgtgcctgctgaatttatgttcttgaacatattggtttggaaaat

SEQ ID NO: 314 - protein, 82 aa, Macropus eugenii
DKEKRKLLMQNQSSTNHPGASIALSRPPLNKDFRDHAEQQHIAAQQKAALQHAHAHSSGYFITQDSAFGNLILPVLPRLDPE

SEQ ID NO: 315 - DNA, 721 bp, Macropus eugenii
cccggctgcagtcaatgatctacaaggcaccagcaggcaggtggcccaggctgtaaagtggctagtctctcattgccccagctccctggaactctgctgccagactctgccgcagtacattgaggatggcgtcagccgcgagttcagcgaccgcttcttctacgaccggaaggagcgacgcttggcgggcctggcctcacaggagcccagcgccatcatcgaactcttcaatagcgtgttgcacttcctggctgaggcagcctcctccgagcagctctgccacatgtcctggcccattacggagttcgcagagccagggggcaacaaggtgcttcctcatctccagtggaatgcacccaaccacctggcctggctgaagaaggccgtgctctccttccagctgccccacatggaccttcccccacagggtgctccctggaggctcgtgtgcaccatgattttccagtatgtgtcccagattccaagctgtggccagacgcagcccatccttcagtcacaggtggagaatcttctgagtcgaacgtatagcaggtggagggacaaagatgtatggactttgggagagctggggccctcagtgaatgagattccatgggatgacattatagctctgtgcatcaaccacaaactgcgggattggaaaccgcctagactgcccgtcacgtcagaggctctgagtgaagatgttcaatatgtgtct

SEQ ID NO: 316 - protein, 240 aa, Macropus eugenii
PAAVNDLQGTSRQVAQAVKWLVSHCPSSLELCCQTLPQYIEDGVSREFSDRFFYDRKERRLAGLASQEPSAIIELFNSVLHFLAEAASSEQLCHMSWPITEFAEPGGNKVLPHLQWNAPNHLAWLKKAVLSFQLPHMDLPPQGAPWRLVCTMIFQYVSQIPSCGQTQPILQSQVENLLSRTYSRWRDKDVWTLGELGPSVNEIPWDDIIALCINHKLRDWKPPRLPVTSEALSEDVQYVS

SEQ ID NO: 317 - DNA, 714 bp, Macropus eugenii
tgaatgtgttggggcctgaagaatgagtgtgtgtggaggcttcccaactgagggggagctagctaggtgtgtggggacataggatgtcctgaatgtagcatcatggctactactttggaatgacagaggctgaaaagtcctcttataaaatatcagagctaggagtggggaacccctgtggctcattgtgatacatctgggagggtggttggggtagggttcaaagagcacagtcttcttggattgtggcattctctgttccttctgtccaccacccccagaaattacccttagccttgagaataccaaggagacagctctcaaatagagctaccaggtggtgaacatcttttggtgctagcagagatctactctgcatagttcaaaagccctgttagcttgttttagagatgttgtgttggccaaagctgaacacacctgagacacggtctcattatgggtggaaaagcttcagctaaatgtgatggctctcagagggtcatcggttttcatgactatgtgggaccagccccactgaaatgaaaagattagatgctcaagatgtatgggggccattaggccaacggggaggcaaatggatttgatttcagtgataacctttggaaatctaacccattactgaggataagaagactgctgcctgcaggtgcagccatgcccaatgagaggatccaaaggatcctggccagcaaa

SEQ ID NO: 318 - protein, 86 aa, Macropus eugenii
  misc_feature (22)..(22): Xaa can be any naturally occurring amino acid
MGGKASAKCDGSQRVIGFHDYXGTSPTEMKRLDAQDVWGPLANGEANGFDFSDNLWKSNPLLRIRRLLPAGAAMPNERIQRILASK

SEQ ID NO: 319 - DNA, 712 bp, Macropus eugenii
ctcaggaagaaaaggtggcccacaccccacctttggtgcctgcagaactcccctcgacactgtccccactgtcccccacccacttggaacaggaggtacaggtggggcaggaggcagagctggcctctctccaggaccacctggagcttgtgggccacagcatcaaggaagccggagccaccatgaagaggctagcacttagcacaggccaggtcgaagcagaggcccagcaagactggctgagtgccacagagagggaacaggccagaaggctgaaacgccaggccgtggacttgctgccagacgcccccagcaacctagccaagctgcaggtggtggtagaggccagtgcccagcgcgtcatccacctcactggccagtgggaaaagcatcgggtaccactcctggctgaatatcgagctctgaagaagcgtcgggaccagagagagttagaatcattacacagggcggcagagctccaggctctacaggagagtgtccggctggctgctgctgaggcccgacgcaaggaagggttatataagcagctggtagctgagctagagacccttcctggagacatggcccgttctgcctacacccatcgcatcctggagatcgtgggcagcatccggaagcaaaaagaggagatcacgaagattctttctgataccaagctccttcagaaagagatcaatgctctgtctggcag

SEQ ID NO: 320 - protein, 237 aa, Macropus eugenii
  misc_feature (237)..(237): Xaa can be any naturally occurring amino acid
QEEKVAHTPPLVPAELPSTLSPLSPTHLEQEVQVGQEAELASLQDHLELVGHSIKEAGATMKRLALSTGQVEAEAQQDWLSATEREQARRLKRQAVDLLPDAPSNLAKLQVVVEASAQRVIHLTGQWEKHRVPLLAEYRALKKRRDQRELESLHRAAELQALQESVRLAAAEARRKEGLYKQLVAELETLPGDMARSAYTHRILEIVGSIRKQKEEITKILSDTKLLQKEINALSGX

SEQ ID NO: 321 - DNA, 723 bp, Macropus eugenii
gtgaaattgagggttccgctggtgttctgggctctgttggccagcctaatctttgtccctagtatagcacctgacagagaagccctgctggtgctgaagtgagaaatgagtcgcttcttgaatgtgctacgaagctggttggttatagtatccatcatagccatggggaacacactgcagagcttccgagatcacacctttctctatgaaaagctgtacactggcaagccagaccttgtgaatggccttcaagcccgaacctttggcatctggactctgctctcatcagtgattcgctgtttctgtgccattgatatccacaacaggactctctaccacatcacactctggaccttcttccttgctctggggcactttctcactgaggtgtttgtattcgagacagctgctccaacagttggagtcctggccccattgatggtggcgagtttctctgtctttgggatgctgctcgggctgcagtacctggaggtagagcaagtgtcccggcacaagaagagaaaatgaagtcctgcgtacacctcttgtttgccagcatcacttacccatggctgagccttcctctaccgtgttctcttcccacctatcctggtgtcttttttctccttgaacatcagccctctttctcttctccccaccccccccttccattctcttagtgttctgaattgctgccacagctaggttttccctttctgacct

SEQ ID NO: 322 - protein, 241 aa, Macropus eugenii
  misc_feature (156)..(156): Xaa can be any naturally occurring amino acid
RSERENLAVAAIQNTKRMEGGGGEKRKRADVQGEKRHQDRWEENTVEEGSAMGSDAGKQEVYAGLHFLFLCRDTCSTSRYCSPSSIPKTEKLATINGARTPTVGAAVSEYKHLSEKVPQSKEEGPECDVVESPVVDINGTETGITDESRVQMPKVXGLKAIHKVWLASVQLFIEKGVIRKLCSVFPMAMMDTITNQLRSTFKKRLISHFSTSRASLSGAILGTKIRLANRAQNTSGTLNFT

SEQ ID NO: 323 - DNA, 652 bp, Macropus eugenii
ctcagcgtgtgctctgctctgccaaggcttctgtcctgtcagaatcatgaaggtctctgtggcagccctctccatcctcctggtcatggctttcaactctctggcatcctctgcaccaatgggctctgaccctcccacctcctgctgcttctcctatgccagccaacagatccccagaaagtttgtgacagactattttgagaccagcagcctgtgttcccagccagctgtggtgttccagaccaaaagaggtcgacaggtgtgtgccaaccccagtgatgcctgggttcagagctatgtggaagatctggagctgaactgaggggtcctgaggccttgggcaatgacttgtaaagggaaatggacccagctttggaattccacaggcagatgcaatctcctcaaactccagatttcaggagatcctctcccccattattacttattcctatctgtggggtttaactcaaattatttggtggtagctttgggcacttgttcttgctatttgcacttttgtaagacgattgttctccatggagatgtctttgagaatactggcttctcttcctaagagttgtttgggtcacctgctggattccatgaacatctataggacagatttcagaataaaacttttgaaaggcataaa

SEQ ID NO: 324 - protein, 106 aa, Macropus eugenii
  misc_feature (15)..(15): Xaa can be any naturally occurring amino acid
QRVLCSAKASVLSEXMKVSVAALSILLVMAFNSLASSAPMGSDPPTSCCFSYASQQIPRKFVTDYFETSSLCSQPAVVFQTKRGRQVCANPSDAWVQSYVEDLELN

SEQ ID NO: 325 - DNA, 717 bp, Macropus eugenii
  misc_feature (679)..(679): n is a, c, g, or t
  misc_feature (689)..(689): n is a, c, g, or t
gctccgcaggcgcctggaggcccagaacacaggcctgcgagggctgcgggaatgccttcctcccaacctgatgggcggagggagacctcgcgggccagccctggacgccctggaggagctgcagggctgtgtgggcgccctggtgactcgctacaacgaggcgcagcgggagctggccagactggagagagaaaaccagcggttgaaggctagcggtgggagcgccgtggcctcccaagccgtcccccaggtagtggccctggagcaggacctggggaaactggaggaggagctgcgggcggtgcaggccaccatgggcggcaagagccaggagatcggaaagctgaagcatctgctgtaccaggccactgaggaggtagccgagctacgtgcccgggaagctgtcaacctgagacagcaggagaagagccgggcttccctcgtggcccaggcacagacttggggccaagagctcaaggctttgctggagaagtacaacagtgcatgccgggagaccgggcagctgagggaggtggtagcagaggagcggcggcggagtcgggagctggctgcccgggccacggagcaggagcgccaggccagtgagatgaggggtcgctcagagcagtttgagaaggctggtgagttgctgaaagagaagatggaccagctgattggngcctgcaggnaaaaggaggcgaagatcagggagttgct

SEQ ID NO: 326 - protein, 239 aa, Macropus eugenii
  misc_feature (227)..(227): Xaa can be any naturally occurring amino acid
  misc_feature (230)..(230): Xaa can be any naturally occurring amino acid
LRRRLEAQNTGLRGLRECLPPNLMGGGRPRGPALDALEELQGCVGALVTRYNEAQRELARLERENQRLKASGGSAVASQAVPQVVALEQDLGKLEEELRAVQATMGGKSQEIGKLKHLLYQATEEVAELRAREAVNLRQQEKSRASLVAQAQTWGQELKALLEKYNSACRETGQLREVVAEERRRSRELAARATEQERQASEMRGRSEQFEKAGELLKEKMDQLIGXLQXKGGEDQGVA

SEQ ID NO: 327 - DNA, 725 bp, Macropus eugenii
gccgcggctcgggcttgctgtagactatggaggcagaggaggaggaaggcttcgcgccctcggccttgggaacccaggagcactgggatgctgtatatgaaagagaattgcgggcttttcaagaatgtggagattcaggagaaatatggtttggagaagaaagtatgaaccgattaatcaagtggatggaaaaatgtaagatcccattggatgcttcagtgctcgacattggaactggaaatgggatctttctggttgaattggtggaagactttttgaatccttccaccaaactgtctggatttcatatttgcattgataaaggaacctttgatgccataagcctgaatcctgacaatgcatctgagaagaggaggcagtatgtgaaatctctctccagggcattgcaagataaaggcttttttctcatcacttcttgtaactggaccataggatgaactgctaaatgagttcagtgaaggatttgagattctggaagaactgccaacacccacgtttacctttggagggagatctggtaacagtgtaacagcattggttttccaaaaaaagtgaggtctttctctggacaaatcagttttgcttttgaaaagctcaaatgtccaattcattctgacagagatagaatgggggcaaatcatttctgagtatatggccaaacagaggactgcacatccctgatacttgcagtggggcagtgagaa

SEQ ID NO: 328 - protein, 182 aa, Macropus eugenii
MEAEEEEGFAPSALGTQEHWDAVYERELRAFQECGDSGEIWFGEESMNRLIKWMEKCKIPLDASVLDIGTGNGIFLVELVEDFLNPSTKLSGFHICIDKGTFDAISLNPDNASEKRRQYVKSLSRALQDKGFFLITSCNWTKDELLNEFSEGFEILEELPTPTFTFGGRSGNSVTALVFQKK

SEQ ID NO: 329 - DNA, 718 bp, Macropus eugenii
tgaaaatccagttggtacaaagcaggctcagaacccttcctatagaggtgagattccctggcacctttctatcaatcagggagaccatttcaactttgatcttgctagatgggggccccttctaacaaattggtccaaacaagggaaagattcctttaggtaggaattagataaccaataacatctcaagtaagtggacaagtaattctaattaattatatttggaatttaaaaagaatagattcaagtgttatgaacttagggttccactgataagctggtgaccctggtcaggattactaatagcaccacctcatttggcatcagctcctgtaatgccatgtgatgtccagagggatgtcttagaggaaacagctcattgtctgccttttgagaggctgttcataaggtgagaaaagttagaaactgactgtgacctgctgttgtacaatttaacactatttgttggcttttaaagggggaaaggaggaattctgacattcaagaagggttgaggggaacattggatttggagtcagagaacctttgttcaaatcctggctgaccttaattgagatacataatctctggacttcagcttacttccacataaagtggatagaatagataatctcttaggtcccttctagtggttacctcattcactgtacaggccttcagacattaaagtaatgactggaacatgtaaaacgcactg

SEQ ID NO: 330 - protein, 53 aa, Macropus eugenii
ENPVGTKQAQNPSYRGEIPWHLSINQGDHFNFDLARWGPLLTNWSKQGKDSFR

SEQ ID NO: 331 - DNA, 715 bp, Macropus eugenii
  misc_feature (682)..(682): n is a, c, g, or t
gagaaactctactaggaagcttggaatccattttctttgagggttaatagagaattcctttcatagcaggaagcctcacttgaatgagtcaagttatcacgagtctgcgataattatcctatagtctaaatttgaagtttttttgacagtccatctcactggtgtttgaaattgctgcatcatcatgggtcacataggaccttgggaaaaatttgggtttaccttcttttgttaatgtggtcagtgggaaatcagtttaaaaccattctcaaaattgctcatcggttattctggttttgggcagatggcataggagttgaaccccaagaaaggagatggtctctctggaagcctcacttccctcctggggcattctcttctgttttgtgtctaccttgaggggttctttcatcccatccaaaactgcaaggaagccacacatgtttgtccatgttgtaaggtctccagaggtggtaggatccttaagtgaggaaactggaacatgaaccagctgctctgtaaaatggagaaatggcagccaactgcataaagagaaagggactaaatttggggtcctgtaaaattcaaatcctctactaacaatttcctccatcattgaaaactagccttaaaaccggactttcgtttattgtctgttgactccttgcatgtctgtgagatntacttgttttggttgctcattaatggtttctgg

SEQ ID NO: 332 - protein, 142 aa, Macropus eugenii
  misc_feature (12)..(12): Xaa can be any naturally occurring amino acid
  misc_feature (33)..(33): Xaa can be any naturally occurring amino acid
  misc_feature (45)..(45): Xaa can be any naturally occurring amino acid
PETINEQPKQVXLTDIKESTDNKRKSGFKASFXMMEEIVSRGFEXLQDPKFSPFLFMQLAAISPFSEQLVHVPVSSLKDPTTSGDLTTWTNMCGFLAVLDGMKEPLKVDTKQKRMPQEEVRLPERPSPFLGFNSYAICPKPE

SEQ ID NO: 333 - DNA, 729 bp, Macropus eugenii
ccaaataactaacgttcagaatttttccttatgaccaaccacaagagaaaaatgtgtttttttttttaataagcatcacaagttactcatttggggggaaggctttgtttacattgttaactacaattaccattgtcctatcctttttggcagcttaatgtctactcacgtatttttttttcccctgtggaaaaggaagacatcaatgttgctcttggttctttttggaatgtgagtcatccaacaatctaagagggcaaacatggaaagcattttgatatgcatcacctgaattttgtaagaagcaagaagacgtgtcacttgaaagcccttgagtgagaatggttttatgatcaggtgctatctgtggagagcctgcgctaatagccttcccatggaaaactgttcctgaggaaactttttcaagatgttcgttactgtctgtacctcacacaagtgaggatgtgcacactcttaggtacttgtgtaattcattgtaatggagaataatcagcatgtaccattaactttgtctacgtgatgtcattttcctgcaattaaccttactatggaaggtacacacccagtccgttgtttctgacagcatccaggtaccgggtttgtttggaaatgcaccccattccgtgtgaggctatttatttaacactttgtcaataaacatgctggcaaaataaaagtgactgcagtgcttgtaaaactaaaaggatg

SEQ ID NO: 334 - protein, 24 aa, Macropus eugenii
MGCISKQTRYLDAVRNNGLGVYLP

SEQ ID NO: 335 - DNA, 716 bp, Macropus eugenii
  misc_feature (582)..(582): n is a, c, g, or t
tgaagccaggctctgcgactttcccgttttttggtgtggcaccggcgatcttgaacgaatctggggaagagttggaaggagaagctgaaggttacctggtgttcaagcagccctggcctgggatcatgcggacggtctatgggaaccacgagcgctttgagaccacctatttccggaagttcccaggctattatgtaacaggggatggttgtcggagggatgaagatggctattactggatcacaggccgtgttgatgacatgctcaatgtgtccggtcacctgctgagcacagcagaagtggagtcagcactggtggagcacaaggccattgctgaggcagccgtggtcagccacccccaccctgtaaagggcgagtgtctctactgctttgtcactctccgggagggccataacttcacccctaccctcactgaggagctcaagaagcaggttagagaaaaaatcagccctattgctaccccggattacatccagaatgcacccggtttgcccaaaacgcggtcagggaagatcatgaggcgggtactaaggaagatcgcacagaatgaccatgacctgngggatacatccactgtggctgaccagtctgtcatcagccatcttttcagccaccgctgccagacaatgctatgaaccaaggttccacccatagctccttctccagacatctctgcttgactgtccaaagttgtg

SEQ ID NO: 336 - protein, 217 aa, Macropus eugenii
  misc_feature (194)..(194): Xaa can be any naturally occurring amino acid
KPGSATFPFFGVAPAILNESGEELEGEAEGYLVFKQPWPGIMRTVYGNHERFETTYFRKFPGYYVTGDGCRRDEDGYYWITGRVDDMLNVSGHLLSTAEVESALVEHKAIAEAAVVSHPHPVKGECLYCFVTLREGHNFTPTLTEELKKQVREKISPIATPDYIQNAPGLPKTRSGKIMRRVLRKIAQNDHDLXDTSTVADQSVISHLFSHRCQTML

SEQ ID NO: 337 - DNA, 758 bp, Macropus eugenii
cgggcatgccacccttcgggatgcctccagctcccccaccgcctccaccacagaactagacttgattttttttttaagaaaatatatatatattatatatatattatatatatatagaattggtctcgttaaaacacacgccgaacctcaccatatggagccagacattgggacgcacgcatgttgtatgtgtgtgcacgcacagggctgggctgtgcgaggaagcctgtcccgggcgactgaggactcgcttgggaagcaggcaggcgttagtaggggcgccagcttgggctctcctggcaccccgtagcatcgagtctcttctttgtcttctctctcctcacccaactccccttgcccctccccaaatggggccgccaggatccgtccccgcggcgatggcccgcgccatgcgagtgaggactttccgcgcccattggtgacccttccggggagacagcctcaacagcgcccctggtggacgggatggttcggcaaagcagcctgacttatttttgtggacggaatcggaacacgctggctccatatcgcgaatttattattatttttttcttttcctttgtatttcattttctcttcctttcctcagactccgtccaaggagatgctgtccctggtcttccgctgcaattagcccccctttccttctcccaggcctagattgttgggtttctgtaccggagggagcaaatggagatttccccattgtgggctgactagaaagggagcctagcgtt

SEQ ID NO: 338 - protein, 91 aa, Macropus eugenii
MEPACSDSVHKNKSGCFAEPSRPPGALLRLSPRKGHQWARKVLTRMARAIAAGRILAAPFGEGQGELGEEREDKEETRCYGVPGEPKLRPY

SEQ ID NO: 339 - DNA, 724 bp, Macropus eugenii
ggttaattggaacctcctgcccccagagttgccccccagagtccctattgaagaggggccgccggtgggggcaacttaccccccaccagctccttaccctcctccggacacaccagacaccacaggttcgttcctgttccagggggagtcagatggaggtgatggggatcatcccctttcagagtacccttggttccatgggaccctctcccgcctcaaagctgcccagctagtgttggcagggggtgctggcagccatggtgtcttcctggtacgtcaaagcgagacgaggaggggggaatatgtcctcacattcaacttccagggcaaggccaagcaccttcgtctgtccctgaatgaggatggtcagtgccgggtgcagcacctctggttccagacagtctttgacatgctggagcatttccgggtccaccccattcccctggagtctgggggctccagtgatgtcaccctcgtcagctatgttgtggcctcccagaggttgcaaggcagggaacgggcagggagccgagctggggtgtgtgagggagatcgctgctaccccgacgcctcttccaccctcatgcccatcggagcgagtgactgtgtaaccgaacatctcccatgacccattgtcccaatttcctgaccctgatccaagggcagaccctgcacaccctggggaagaggaggagatggttgagcaccacaagctccagaggag

SEQ ID NO: 340 - protein, 241 aa, Macropus eugenii
  misc_feature (241)..(241): Xaa can be any naturally occurring amino acid
VNWNLLPPELPPRVPIEEGPPVGATYPPPAPYPPPDTPDTTGSFLFQGESDGGDGDHPLSEYPWFHGTLSRLKAAQLVLAGGAGSHGVFLVRQSETRRGEYVLTFNFQGKAKHLRLSLNEDGQCRVQHLWFQTVFDMLEHFRVHPIPLESGGSSDVTLVSYVVASQRLQGRERAGSRAGVCEGDRCYPDASSTLMPIGASDCVTNISHDPLSQFPDPDPRADPAHPGEEEEMVEHHKLQRX

SEQ ID NO: 341 - DNA, 715 bp, Macropus eugenii
gagaagtgagatccaacagctattatcatgaaattccttctgctcactgttggattggccctcattggtgccatccaggctgttgaaaacattcgctccaagaatgatttaggggttgaaaagtttgtaggatcatggtatctcagagaagcagcaaagaccatggaattctcaatccccttgtttgacatggacattaaggaagtgaacttgactcctgaaggcaatctggaattggtcttgttagagaagactgacaggtgtgttgagaagaaattgcttctaaagaaaactcagaaacccactgagtttgagatctacatttcttcagagtctgcctcatatacattctctgtaatggaaactgattatgacagctacttcctcttttgcctgtacaacatcagcaaccgggaaaaaatggcatgtgcccactatgtcagaagaatagaggaaaacaaaggcatgaatgaattcaagaaaattctcaggactttggccatgccctatacagtgattgaagtccgtacaagagacatgtgccatgtttagggaaagcagacgaagttatccccctccaagatcacatctcagcatggcagaatctatggtggtttccattatgaaatcattaataaactgaaaatcatggataccatttgattcttttgctttcttctttttataaggaagtgatgtctaccatgtttctgtc

SEQ ID NO: 342 - protein, 213 aa, Macropus eugenii
  misc_feature (3)..(3): Xaa can be any naturally occurring amino acid
RSXDPTAIIMKFLLLTVGLALIGAIQAVENIRSKNDLGVEKFVGSWYLREAAKTMEFSIPLFDMDIKEVNLTPEGNLELVLLEKTDRCVEKKLLLKKTQKPTEFEIYISSESASYTFSVMETDYDSYFLFCLYNISNREKMACAHYVRRIEENKGMNEFKKILRTLAMPYTVIEVLQETCAMFRESRRSYPPPRSHLSMAESMVVSIMKSLIN

SEQ ID NO: 343 - DNA, 723 bp, Macropus eugenii
ggcaaacctacgtgtccggagtgcttagatttggaaaagtggatgtaactgaagttcagctagccatagtttttgtctttttcttaacctcatttggaggagcatcaatgtgggattatattatccctgtgattgaaataaaactgaagattttccctcttctcggaatagtagcaggagtattcttttcctgttctaattatttccacagcatcctcagtggtggagttggcaagaatggatccacgatagcaggcaccagtgttctgtcacctggcatccatataggattaattattcttctagccataatgatctgcaaaaaatctgcaacccagctgtttgaaagacatccttgtctttatgttttaatgtttgggtgtgtgtatgccaaaattacacaaaaattggtggttgctcacatgaccaaaagtaaactaactctacaggaccccgcatttattgggccaggtcttctgtttttggaccaccacttcaacaattgcatagacgaatacattgttctgtgggtagcaatgatcatctcttcacttgatccgatgacatatatcacctgagcacatccgcccatcgcagatcactctcattctccactctccaggattccatcccctaatcaccactaacaggtcctagtttttactctatagagctccttgcaataccatggtctgaattacatcatcttaccctctgctcccc

SEQ ID NO: 344 - protein, 211 aa, Macropus eugenii
QTYVSGVLRFGKVDVTEVQLAIVFVFFLTSFGGASMWDYIIPVIEIKLKIFPLLGIVAGVFFSCSNYFHSILSGGVGKNGSTIAGTSVLSPGIHIGLIILLAIMICKKSATQLFERHPCLYVLMFGCVYAKITQKLVVAHMTKSKLTLQDPAFIGPGLLFLDHHFNNCIDEYIVLWVAMIISSLDPDDIYHLSTSAHRRSLSFSTLQDSIP

SEQ ID NO: 345 - DNA, 713 bp, Macropus eugenii
  misc_feature (627)..(627): n is a, c, g, or t
ctttggaactggggcctaggaaatagcaaggggcagaagcaatggatgggtcttatgccccaaggcaggaagtagaaggagggaagctgagaaggcccacaaaaactctgcccttctgggaagacgctaaaaccaggaaatcttggaaatactgtgtcatatagaaagttcaaattggaactcacctggggaggagggattggacaggaggcagggggtagggatcgaaggagaaggacatgtcttaaggaagggatttttgaggatctttagatagaagaaactggagttagtctctgttacttctaagaaagagccctgggttgataattatcaccaccttacttctggccaccccatcacccccagttctctcacagtgttggggaaagcagttgataggatcatgggtcgggagatggaagaccagcttgtgcagatgaagctcagggccactgggtgctttacccaagatcacacagacttgatctgaaatctctgtctctttgactctatcccatggttctcttactggaggtcataaacaaaactagccagccaccaaggcttggagcagtgggtcccgagggcacccacagaagtgtcctcagttctctttactgcctncttccaccctcaagtcccctacatcctccctcccacatcagctttgctctagaggaagtgaaatcagaagagtatttcctctccct

SEQ ID NO: 346 - protein, 28 aa, Macropus eugenii
MGREMEDQLVQMKLRATGCFTQDHTDLI

SEQ ID NO: 347 - DNA, 719 bp, Macropus eugenii
ctctgagctcgtggggcaagccactgctgtccagtgacttccagctgctgtgcagggatggcagccgggcagaggtcacccagtggaggcgctgtcacttggcccgggtgcccgctcatgctgtggttgtcagggctgacacggatggggcccttgtgttccgcttgctgaacgaaggccagatgagattcaaccaggagggagccagcttccagatgtttgagtccgatgccttccagcagaaaaacctcttgttcaaggattccaccatggagttggtgcccatcgccacgcagacttaccaggcctggctgggcaccgagtacctccatgccatgatgggcctggtttgcgaccccaacaggctccctaactacctccgatggtgcgtgctgtccacaccagagatccaaaagtgtggggacatggcagtggcctttagccgaaagcagctgaagcccgagatccagtgcatctcaggcgagtccgccaggcactgcatggaacagatcaaggccaaggaagccgatgtcatcactctgagtggaggcgatatttacacagccgggcagagctacggccttgtgccagctgcaggggagagctaccaggcagatgacgggaaggacacatactacgcagtggctgtggtcaagaggaacagctcctatgccttcaccatagatgaactcaagggcaagcggtcctgtcactccggc

SEQ ID NO: 348 - protein, 239 aa, Macropus eugenii
LSSWGKPLLSSDFQLLCRDGSRAEVTQWRRCHLARVPAHAVVVRADTDGALVFRLLNEGQMRFNQEGASFQMFESDAFQQKNLLFKDSTMELVPIATQTYQAWLGTEYLHAMMGLVCDPNRLPNYLRWCVLSTPEIQKCGDMAVAFSRKQLKPEIQCISGESARHCMEQIKAKEADVITLSGGDIYTAGQSYGLVPAAGESYQADDGKDTYYAVAVVKRNSSYAFTIDELKGKRSCHSG

SEQ ID NO: 349 - DNA, 767 bp, Macropus eugenii
  misc_feature (624)..(624): n is a, c, g, or t
gggatcaagagcaaaagaaagctgcagaatcccatagttgcaaggaacatcagagaccatacagttgaacttctacttgaataggaatactctctccaacgttgccaagcaatcatccaagtgttttcactcaagtatcttcagtgaagaggaacctcccacctcccagaggagcctatcccacttttggacagcagtaattgcagaaaatttctctttactttaagcttaagcctgaccctctgaaactttcattcactgcttctagctctactgtgtggggatcaagcagaatgtatctagtgcccttccatgctacagattttcccaaaatggagaggaagctggttcttatcttggcttttggactagctacttgcctaacttcaggcaatccatttcatcacctctctctggacctgttttctcatctctcaggtggttagatgatgagctctaaagtccttttctggatataaaaattctgtcattctattagcttgaaatgtaacaatatcaaaaatttgctccacttgcagaaatggattacttattattgtgggctaatagggtgtgaagacatctctctgcttcctgcttcctaatattccctgcatccatggngcagataaagagagcaagagaggagaacacattctcaactctggtggctatgaaataagaatgatgccactttctctagctcttagttttgataaaaaagttttcccctctgactagcccatcattattaagcatgctcacac

SEQ ID NO: 350 - protein, 130 aa, Macropus eugenii
  misc_feature (57)..(57): Xaa can be any naturally occurring amino acid
  misc_feature (77)..(77): Xaa can be any naturally occurring amino acid
MDAGNIRKQEAERCLHTLLAHNNKNPFLQVEQIFDIVTFQANRMTEFLYPEKDFRAXSSNHLRDEKTGPERGDEMDXPEVRQVASPKAKIRTSFLSILGKSVAWKGTRYILLDPHTVELEAVNEVSEGQA

SEQ ID NO: 351 - DNA, 761 bp, Macropus eugenii
  misc_feature (638)..(638): n is a, c, g, or t
  misc_feature (670)..(670): n is a, c, g, or t
  misc_feature (674)..(674): n is a, c, g, or t
  misc_feature (712)..(712): n is a, c, g, or t
cacagcaccttccctcaactattactgggttcctatcctgacagtgatcgtcggctcctacctgattgctcacggtttcttcagtgtctatgggatgtgtgtggacactctcttcctctgtttcttggaggacctggagcggaatgatggctccgtggagcggccatacttcatgtcttccaacctgaagaagcttttaaacaagaccaacaagaagctagctgaagcgtaggcctcctcccaggcctcaatggaagggagggaggaggtggtttacattagggtcagtacatgcccccactaacctgccaacccatgagatggaggctaaaccccactcactctccctcgggctatctgacaagggggcctccctattgcactatggtttacactcttagggtggggcagctagtacaccaagcccctcccatccttgggccccttcttagtagactcattgatctaagagactgccagtcacaggccctcagaggctcccttttttgtgggggaggatggagaattattcttgtgctgagagatctccaagaaagatgttctctccactcttctcttggttccctggtcaggaaggttttcttcttgtcatccctcttggctcaggcccaggcccnttttctctgaccccctgagaagggttgaggangcangatgagctgcctggattcagttctgtgatccacttggncccagacgccagtttgcaagagtgggtggaggggaatgttcataactta

SEQ ID NO: 352 - protein, 76 aa, Macropus eugenii
TAPSLNYYWVPILTVIVGSYLIAHGFFSVYGMCVDTLFLCFLEDLERNDGSVERPYFMSSNLKKLLNKTNKKLAEA

SEQ ID NO: 353 - DNA, 719 bp, Macropus eugenii
cgactacattgttttggccatttggtcaagctcttgttcctggctgaagaaatgctgtccgtgtataacgtacatgtgaatgtttacggtggcagggaggaagggtgacagggatagaatttaggaatcaaaactttaaataaaaaaaaaattttttctaagagtgagcaaaaagaaggaaagagcgagagttgactggcgttttgtgaggaaaaggggatgttttctctcctaccataataagggatatgaggagaacaaatatattaggggaagcattgggaaaaggctgtgatgcttttgtaaaccaaatatgcaggattggttaaaatgaagctttaaaaaaaactgtgtgaataaaaaaggtcatggttaagagtgataacccacattcctcgttgatatcctctgaatgtcacaagaatttgaggaagcctcctagcaaaatggataaaccctctgtgggagtgaatttgtgggatgacaagaacaggattttgctcaggatgagcataaatggatggattccaatctgcgtccttggagggaataccaacatcattgaaatcgaagaactcttggagtactgtaataagtaagcgtctgcttatgtgtctaataacatacaggcactagacatacatgcatgtatgtatgtacgtatgtatatgtatatatacaaaaatgtcaatttatgtgaaaagttaggaatataaaac

SEQ ID NO: 354 - protein, 76 aa, Macropus eugenii
MVKSDNPHSSLISSECHKNLRKPPSKMDKPSVGVNLWDDKNRILLRMSINGWIPICVLGGNTNIIEIEELLEYCNK

SEQ ID NO: 355 - DNA, 722 bp, Macropus eugenii
ctcaggggaggagccagggttcttagcatggatagttcttgcatttattaaggctgccatctcttctgggtcaggagcctttgctctcaccctttctgagtcttctgaagcactattattacatggttaccctctgggccttcatggctcatttcttgcttagccaggatgcagcaggaagtgggtcaggggaggagaattcctgggatggattgtttgtagcatctgtcctaagataatcttttcaatgaggaaatgtcattgctcatggcactaagacttccaagaagaacccaggactatctgctcccactgaagtcacaccacaacagccttactagcttcataaaatttcatagaatttgagttaagctccatcacttcataagtattaaaactgaggcacagagagctcaagtgacctgctcaaagctacacaactagttagtgccagaattaggagcagagtcctgatctaatgttcttccaatagacagcatgctttcgctatttcatccctagtttccttagtctctctggttccatcctctcccctttcctgtgcataagagccagattcactcagtactcaaatatttaagtgactctatgatctcatcaatttaagaattccttccaatgatgtggatccagaccactccatgcctatccatccacaggattctcatccacttcctcccaaaagttcaccatatggggtt

SEQ ID NO: 356 - protein, 90 aa, Macropus eugenii
  misc_feature (33)..(33): Xaa can be any naturally occurring amino acid
  misc_feature (50)..(50): Xaa can be any naturally occurring amino acid
MSNDISSLKRLSWTDATNNPSQEFSSPDPLPAXILAKQEMSHEGPEGNHXNNSASEDSERVRAKAPDPEEMAALINARTIHAKNPGSSPE

SEQ ID NO: 357 - DNA, 717 bp, Macropus eugenii
tgtatatcagtgtatcaaacaattactactttattctgaggtacaaaatatattttcagacaataaccaatcaataagataactaaactcattaacttagaagataacatgtattcatgtcaccctcaagaaatctcatttaattaacaaaaagtttagatgtgcttcctacaatggaaacatttcgtattttatacttctctagaagatgaaacataaacaaaccacatgtttttatgtcttaagaagagcctacaaggactagactagtatagttttgggataggaaatatataatctacctccagtccccaatctctaagtcaatagtactccctgaaacaaatctagacctgcgttcagctgagttacactgctagaacttaatgacattcataatggctgctggccctgattcaagcacttggaaatcagggaggtgagattgggcgtgttcttttcccatatgcattaattgtttaaatgtagccttaacttgatggcgttgctctttgattctagacattacatttcagtttttaaaattctctatatgactgtcaaagactgaaaattctcatgcaagatgtctgtattgaaaaggtcgcatagtgaaccgaaaactgttgtatctttgaaaagacaatacgaaacagacaaggctatgcttctgatattaaaaacaacaaacgagtgagtcaaaaaaaaaaacgaact

SEQ ID NO: 358 - protein, 36 aa, Macropus eugenii
MSVLKRSHSEPKTVVSLKRQYETDKAMLLILKTTNE

SEQ ID NO: 359 - DNA, 733 bp, Macropus eugenii
  misc_feature (694)..(694): n is a, c, g, or t
cttggaggtatacgtgtgtgactgtgaaggtgctgtaaccaagtgtgtgaggacaggtgtgattgcccagaccggcgtaggtgtgccagtcatcctgggaatactaggaggaatccttgcattgctgattttactgctgctcctgcttctctttatccgaagaagaccagtggtgaaagagcctttactgcctcccgaggatgacaccagggacaacgtctattattatgatgaagagggaggtggagaagaagaccaggactttgacctgagtcagttgcaccggggcctggatgctcgaccagaagtgattcgtaatgatgtggcaccaacactcatgagtgtcccccagtatcgccctcgcccagcaaatcctgatgaaattggcaatttcattgatgagaacctgaaggctgctgacagtgaccccacagcgcctccttatgactctctgctggtgtttgactatgaaggaagtgggtccgaggctgcctctctgagttccctgaactcttctggctcagatgaagaccaggattacgattacctgaacgaatggggcaatcgctttaaaaagctggctgacatgtatggtggaggggaagatgattaatggcagagggtcaagtcaagtcaagaaacaatctccaggggctgggtcatccccaaacatcgggaaaggggcatggattanagcagttctatccatgcttccctcaactctataacctaa

SEQ ID NO: 360 - protein, 203 aa, Macropus eugenii
LEVYVCDCEGAVTKCVRTGVIAQTGVGVPVILGILGGILALLILLLLLLLFIRRRPVVKEPLLPPEDDTRDNVYYYDEEGGGEEDQDFDLSQLHRGLDARPEVIRNDVAPTLMSVPQYRPRPANPDEIGNFIDENLKAADSDPTAPPYDSLLVFDYEGSGSEAASLSSLNSSGSDEDQDYDYLNEWGNRFKKLADMYGGGEDD

SEQ ID NO: 361 - DNA, 741 bp, Macropus eugenii
gttgtttagtcttatttcaccttcccaatccactgctactgatttaattaaagaggagggattggggaggagtagctccccagtataacagaccttggtgaattaccagggctgtctaccccaagcatgtgaagacttcctcaggtggaatgggcagatgcaaacagtttggtccagtggtcatgaaggtgtctgaccatgaaggccagacattcaaagatgccaaggtcatcctctggatcctggcccatttccagtcatcctgacttttgtcttatgtggggtccaagattgtccaatctgcaagaaaatgcaactgtggcagatctcttaagtcaatagcactttactaaagggtccatggctccctccaataaagtggaactgagatcttcctcacaatctgagatgccgccttctcctaggaccttacttttattgagtttgatacctaaacatgcaaaagagccatggtaaatttcaaaatcttggttggtagagcttgattttgactctccaggagagccaaaaatgacacatcaggatgggttgtcataagagggcaaggcaagtgtcatctctgttgactaagtggtcatatggaggtctcttgttcatgttggacaagagagggtggacgtataaaacaaattgcggacctttccgtataagccaccttattatgcttggcattggaacttggcaaacagatggagatacctttgaatcattcttgcggtg

SEQ ID NO: 362 - protein, 248 aa, Macropus eugenii
  misc_feature (62)..(62): Xaa can be any naturally occurring amino acid
  misc_feature (96)..(96): Xaa can be any naturally occurring amino acid
  misc_feature (149)..(149): Xaa can be any naturally occurring amino acid
  misc_feature (203)..(203): Xaa can be any naturally occurring amino acid
  misc_feature (220)..(220): Xaa can be any naturally occurring amino acid
HRKNDSKVSPSVCQVPMPSIIRWLIRKGPQFVLYVHPLLSNMNKRPPYDHLVNRDDTCLALXMTTHPDVSFLALLESQNQALPTKILKFTMALLHXLGIKLNKSKVLGEGGISDCEEDLSSTLLEGAMDPLESAIDLRDLPQLHFLADXDNLGPHKDKSQDDWKWARIQRMTLASLNVWPSWSDTFMTTGPNCLHLPIPPEEXLHMLGVDSPGNSPRSVXTGELLLPNPSSLIKSVAVDWEGEIRLNN

SEQ ID NO: 363 - DNA, 705 bp, Macropus eugenii
gccctgaaagccaagcaggccagacactcctggaggtggctaagaaaagagtctgtcccaagcattaggtcctatgggacacaacatagggctcttccttctcagctttgccctatgcacatccccctaggtactcatcagcctgaactcacatcccagcgccagtcccagacaaagcttcaccaaaggctctccccttgtccatagcccctggacccttgaacctgacagacccagaatccccatagtccaggctcccctgtccccaaagcttccaccaccctcctctattccatcaatattgaccaagtgtctcttgcttggtactttaaagtcttaccacactcaacaggattgctctcctcttccattttaattgaagatgtaagctctcatatgaaataagtcaaataagaatccaaacagagataaaaggagacttttgagggatagttcttactcatttggccatttgtgttcttaaggagatggtgtctccatggaaacatttggtccaaacatccgcactaggagttatgtgggagactttcagagaggtagatttctctgtaattagattgtgagcttcttgaggacaaagactgcctttttgcctctttttgtatccctagcacttagcttaatgcctagcctatagtaggtacttaaataatgcttaccaaacttctaaaaaaaaaaaaaaag

SEQ ID NO: 364 - protein, 82 aa, Macropus eugenii
  misc_feature (54)..(54): Xaa can be any naturally occurring amino acid
ALKAKQARHSWRWLRKESVPSIRSYGTQHRALPSQLCPMHIPLGTHQPELTSQXPVPDKASPKALPLSIAPGPLNLTDPESP

SEQ ID NO: 365 - DNA, 772 bp, Macropus eugenii
  misc_feature (630)..(630): n is a, c, g, or t
  misc_feature (661)..(661): n is a, c, g, or t
  misc_feature (668)..(668): n is a, c, g, or t
  misc_feature (681)..(681): n is a, c, g, or t
  misc_feature (704)..(704): n is a, c, g, or t
  misc_feature (707)..(708): n is a, c, g, or t
  misc_feature (735)..(735): n is a, c, g, or t
  misc_feature (740)..(740): n is a, c, g, or t
  misc_feature (745)..(745): n is a, c, g, or t
catttacataataatccttcctgtttctaagtgttttaccatttcatctcctgagaagtctctttttctggtgtggaagtgaccacaaaaactctgcatgcccttagagtgcaaggttgggtgggacaagttggaaagcctttaattatgttccttgcaatagaaactgcctaccagttatccagagaccagtctagcttagttcaaagaagccaatcaacagaggctgctagcatgtgtagtgcatagaggtgatgggcctggagtcagggagactccttttcctgagttcaaatgtggcctcagtcacttattagctgagtgatcctgggcaagtcacttaaccctgcttgcctcagtttcttcattataaagtgagctggagtaggaactggcaaaactccagattctctgctaaggaaaccccaaatggagtcatgaaggacaacaacaataggactgaacaaccatcaacagaggactggccaccaggtgatttttattctttatttttggctatagccagtacgagatggcctaggacaaagctgtccctggttgccctgacatagcttcctggccatctaaagaccatgtagaatttaaggctctcagactggcccaccctangagccttaccctgctctgccaccagacccanttaacanaggagaccttatncatgttgcacatccatgctgggntanngacaagtaaacatcttcatgttacatngttangactngagagtgcctcatttcacgctacattg

SEQ ID NO: 366 - protein, 92 aa, Macropus eugenii
  misc_feature (64)..(64): Xaa can be any naturally occurring amino acid
  misc_feature (75)..(75): Xaa can be any naturally occurring amino acid
  misc_feature (77)..(77): Xaa can be any naturally occurring amino acid
  misc_feature (81)..(81): Xaa can be any naturally occurring amino acid
  misc_feature (89)..(90): Xaa can be any naturally occurring amino acid
MKDNNNRTEQPSTEDWPPGDFYSLFLAIASTDGLDKAVPGCPDIASWPSKDHVEFKALRLAHPXEPYPALPPDPXNXGDLXHVAHPCWXXDK

SEQ ID NO: 367 - DNA, 680 bp, Macropus eugenii
tgtgcactgctcactccttgtcttccaatctctgcatcacctgcagtttcattcatgtggaacatggcaggaagtgtcctaagtggcctttctctggccatgctgcggcactgggcagcaaacatttatgatgaacatttattatgcttcctctttcctcaacctcttcctgcctttgggtaaaggggagaaaggccaagccttcaactttacctactggacccctggcctgagctgcttcttgtccagaaaagggctccaccctggggctaatgagaagcattgattactcatctgaactcatcggttcaggtaactcccaccaagtcctaactctccccatcccagcagttctgaactcccagccatcaccattcaaacccacttctccaagttttggatcaaagagcacgattatttttgtcactttatttgcatagtttcaaaatggtttttaccaattcacaactgcactaacaatgtgctagtgtgcttagcacatccttccagtgccgtctattgacatcttttagtcatctttgctgtttgcagcatgaaaccccaggtgcttttgatttgtgtttctcttactagtgatttggaacatactttcatgtggttgttaatggtttgtgattcttttgaaaaatgtttgttatgtaacttggatactaaacgct

SEQ ID NO: 368 - protein, 157 aa, Macropus eugenii
CALLTPCLPISASPAVSFMWNMAGSVLSGLSLAMLRHWAANIYDEHFYASSFLNLFLPLGKGEKGQAFNFTYWTPGLAASCPEKGSTLGLMRSIDYSSELIGSGNSHQVLTLPIPAVLNSQPSPFKPTSPVLDQRARLFLSLYLHSFKMVFTNSQLH

SEQ ID NO: 369 - DNA, 760 bp, Macropus eugenii
  misc_feature (579)..(579): n is a, c, g, or t
  misc_feature (724)..(724): n is a, c, g, or t
ggcttaaccatgcaggtactcctattggtgctggggctgctcagcctgatgactccacttggctatgcccaggaccagccataccaggatgtgctgaatagattcattcaggaatacaacacaaagtcagaatcagaaagcctctttcgtctctcagtcctgaatctgccatcacaggagagcaacgatcctactgctccacaacttctgaaattcaccatcagagagactgtgtgctctaaaagtgaacatcgcaatccagaagaatgtgatttcaagaaaaatgggctggtggaagagtgcattggaacagttgacctggattcctccagtccctctgttgatatttcctgtgatgggcctgaaaaggtcaagagaggatttgggaagaagttgaggaagagactgaagaaatttcggaacagcattaagaaaagattaaagaactttaacgttgtaattcctatcccactgccagggtagcctcctgtatgcgactgagcctcagttctctatcttaaggccttgcactataccttggtctgctcagattaataaaccccaattttactctcaaanaaaaaaacaaacacccccccccctctctcccccccccacccccttctcctatcaccattcaccttggcctctcctcttcacttctcctctccaggtgcctaccttacatcgcttttcctttttcggatatagtgcgtccttattntaagctcctgtgggcgcgccctcctctccttcccct

SEQ ID NO: 370 - protein, 150 aa, Macropus eugenii
  misc_feature (145)..(145): Xaa can be any naturally occurring amino acid
GLTMQVLLLVLGLLSLMTPLGYAQDQPYQDVLNRFIQEYNTKSESESLFRLSVLNLPSQESNDPTAPQLLKFTIRETVCSKSEHRNPEECDFKKNGLVEECIGTVDLDSSSPSVDISCDGPEKVKRGFGKKLRKRLKKFRNSIKXKIKEL

SEQ ID NO: 371 - DNA, 751 bp, Macropus eugenii
cttacaactacatttggatcataatgatttagaagattttccatttcctcttcctaattctttagaaagacttcttcttgggcacaatgagatctccagagtggaggcaaatgccatggaaggattaacaaacctgaccatgctggacctctgccacaatcagctgcatgactctttactgaaagaaaaactttcccaactgagcaaactgatgcaactcaatttatgtagcaacagattagagtccatgcctcttgacttaccttcctcacttatgcatctgtctctagaaaataattccatttctctcataccacataattacttcaaaaaattccccaagcttcttgccctgagaatatcgtacaacaagctgcaagaaattccacatgacatttttaacatttccagccttgtagagctcagcatcggacataacaaactgacgcaagccttctacataccaagaaacttggagcatctgtacatggaagacaatgagttttgaatacataaatgtcaccctgatgtgtccatccgttgacccaatccattatcgccacttgacctacattcgcctggaccaaaacaggctacaagaaccaataagctcctacatcttcttttgcttcccttacatccacagtgtttattatggtgaacaaagaaaacctgatggacaaatggtgcagctgaagacacaagtgtccgcaggtttctggtgaggagatagatgaataaaatgacgatg

SEQ ID NO: 372 - protein, 245 aa, Macropus eugenii
LQLHLDHNDLEDFPFPLPNSLERLLLGHNEISRVEANAMEGLTNLTMLDLCHNQLHDSLLKEKLSQLSKLMQLNLCSNRLESMPLDLPSSLMHLSLENNSISLIPHNYFKKFPKLLALRISYNKLQEIPHDIFNISSLVELSIGHNKLTQAFYIPRNLEHLYMEEMSFEYINVTLMCPSVDPIHYRHLTYIRLDQNRLQEPISSYIFFCFPYIHSVYYGEQRKPDGQMVQLKTQVSQVSGEEIDE

SEQ ID NO: 373 - DNA, 772 bp, Macropus eugenii
  misc_feature (611)..(611): n is a, c, g, or t
  misc_feature (653)..(653): n is a, c, g, or t
  misc_feature (665)..(665): n is a, c, g, or t
  misc_feature (730)..(730): n is a, c, g, or t
gcaagttaaggggtcataaaacatactaaactcctgcactttttgaggggaaatgattatatatgtgtgtgtgaaaacagtgttccagtccataagcagaggcctagacttttttcataaattgtctttttactgttgctacaaatagatgatgctgtgattctgccttatattttatataaaatccagcaaagttagggttttggtgtttttttttaacctgaaactcaatgactgttaatatcttaaagattaacttgaagcatgttcagctccattctgtgaggacttatgctgttttcaaaactcaggaatcatttgcaaggatctttggtaacctaagattgtttcccagaccaaatcctgtttatgctgaaacaaaagaatttgtgccccagcctatcatcctaccatcccctcccattttcctctccccacctcccctcagctccaggagaggactcagcagattctttcaatgtagatttataatcatgtacttttggatccgttaaaggaagggggcaggacaccccaatgaatatttgaatattttattggttcaactcaacaaggcacagtctcctcctctagcaatgtgggattatggngaaaaccagttcagtgctgctactgggggcaatggagccttntggaaaggtatntgaggttggttctttattgagtggagggctatatgggttactccctcttgaaaagcatatgttgnctttgctttggatcaattatagcagatccatctttccctttg

SEQ ID NO: 374 - protein, 22 aa, Macropus eugenii
  misc_feature (14)..(14): Xaa can be any naturally occurring amino acid
KGKDGSAIIDPKQXQHMLFKRE

SEQ ID NO: 375 - DNA, 770 bp, Macropus eugenii
gagacgtgcgtgcagcgggtgaagaagtacctggagatggggaaggagaccctgatgaggacagacccacctaaagccagagtgacccgccacactgccccccatggggaggtgaccctgaggtgccgggcccaggacttttaccctaaggagatctccctgacttggctgagggatggggaggaacagccccaggacatggagttcattgagaccaggcctgcaggagatggcaccttccagaagtgggcagctgtgcagatgacctcgggccaggaaggcagatacacctgccgcgttcagcacgaggggctgtctgagcccttcaccctgcagtgggagccacagtcttcatccacctggctcattgtgggggccatcgctgctggcctcctcctcctcactgcagttattgttggagttgggatatggagaaggaagcattcaggtggaaaaggaggtgattatgttccagctgcaggcaatgacagtgcaaaggggtcagatgtgtctctcacagccaaagcttgagagaattgcctggcatggacctgagatggaaaccagtttgcagtccccatactgttcctgttgacccctggcctctcttccctgcactgaccccttcaatcctccttggactctattggcccaagcccagggcagcctcatcagggccttcatcctgttttttaaggcctacctccctcctcccccttgtttttgtgtttgcttgggaatgagcgcctgatgtctgaccgataaacaac

SEQ ID NO: 376 - protein, 176 aa, Macropus eugenii
  misc_feature (161)..(161): Xaa can be any naturally occurring amino acid
ETCVQRVKKYLEMGKETLMRTDPPKARVTRHTAPHGEVTLRCRAQDFYPKEISLTWLRDGEEQPQDMEFIETRPAGDGTFQKWAAVQMTSGQEGRYTCRVQHEGLSEPFTLQWEPQSSSTWLIVGAILLASSSSLQLLLELGYGEGSIQVEKEVIMFQLQXNDSAKGSDVSLTAKA

SEQ ID NO: 377 - DNA, 783 bp, Macropus eugenii
  misc_feature (569)..(569): n is a, c, g, or t
  misc_feature (587)..(587): n is a, c, g, or t
  misc_feature (598)..(598): n is a, c, g, or t
  misc_feature (639)..(639): n is a, c, g, or t
  misc_feature (738)..(738): n is a, c, g, or t
  misc_feature (752)..(752): n is a, c, g, or t
  misc_feature (761)..(761): n is a, c, g, or t
ggactccacccacatttgattcctttccatcttcacatcatccagattcttctaattttagccctcagatggaatcatatgacgttccagtttctttcccaactgtgtccgtggaaaaggcccctcattttatcctgctgagaaacaaccgcactgaagacacgatgtgtgtgaatgtcaagggatcacctctgaccccccagagtctcttctctgatcctgtccaaggcattgagctgactggccagtatgaggggagcacagataagtttgtctggctccaggtgagctacaggactcctcaggtgaaggtgcgtgtgacccaggacagcatcgtggtgactcgtggcaatggtgggaaaagctcttcttatcagtggcagaggacgctgtacttggtgatgcctgggctgaagctgaccttggaaaatggtctcttgctgctcagtgactcagacaaagtcaccattggcctagtgtccttgggccctcccactgctggactgcggctctttctaaatgatccaggtcacttctccagccaggccagtggagtccttggtcagttntaccaggacttgcagtgngatcctgcggngccaagcacagttgaagacacacgggagctgagtgtagggngaagacatatacagtcaccagaaaatccatggttgattttcgaggaagcagagatactgtcccaatgccaaaggtctcatgcttgtacctagagcagtncttatgagatggangagaatcangaccagctacacccttctggag

SEQ ID NO: 378 - protein, 261 aa, Macropus eugenii
  misc_feature (189)..(189): Xaa can be any naturally occurring amino acid
  misc_feature (195)..(195): Xaa can be any naturally occurring amino acid
  misc_feature (199)..(199): Xaa can be any naturally occurring amino acid
  misc_feature (212)..(213): Xaa can be any naturally occurring amino acid
  misc_feature (227)..(227): Xaa can be any naturally occurring amino acid
  misc_feature (251)..(251): Xaa can be any naturally occurring amino acid
  misc_feature (254)..(254): Xaa can be any naturally occurring amino acid
TPPTFDSFPSSHHPDSSNFSPQMESYDVPVSFPTVSVEKAPHFILLRNNRTEDTMCVNVKGSPLTPQSLFSDPVQGIELTGQYEGSTDKFVWLQVSYRTPQVKVRVTQDSIVVTRGNGGKSSSYQWQRTLYLVMPGLKLTLENGLLLLSDSDKVTIGLVSLGPPTAGLRLFLNDPGHFSSQASGVLGQXYQDLQXDPAXPSTVEDTRELSVXXKTYTVTRKSMVDFXRKQRYCPNAKGLMLVPRAVLMRWXRIXTSYTLLE

SEQ ID NO: 379 - DNA, 734 bp, Macropus eugenii
cggccttccttcgaccttgtctgcggagcctagctgcctcattcctcttggcccccagttaccgtcatactgtcaacatgtctgcgggcaatgccaagattgggttcccagcccccaatttcagagctacagctgttatgccagatcggcagttcaaagacatcagcctttctgattacaaagggaaatatgttgtgttgttcttctaccccttggatttcaccttcgtgtgccccacggagattattgcattcagtgatcgagctgaagaatttaagaaactcaactgccaagtgattggtgcttccgtggattctcacttctgtcaccttgcctgggtcaataccgtcaagaagaatggtggactgggagccgtgaatatcccattgatgtctgaccccaaacgtaccattgctcaagattatgggatcttaaaggaggatgagggaatttcgttcaggggtctcttcatcattgatgacaaggggatccttcgccagatcaccatcaatgaccttcctgtgggccgctctgtagatgaaactcttaggcttgtccaggcctttcagttcacagacaagcatggcgaagtgtgccctgctggctggaaacctgggagtgacaccatcaaacctgatgttcaggggagtaaggagtacttctccaagcaggagtgaactgctctttgcagccatggatgtccccacccatgaagcctgcagactcactagcta

SEQ ID NO: 380 - protein, 244 aa, Macropus eugenii
  misc_feature (244)..(244): Xaa can be any naturally occurring amino acid
AFLRPCLRSLAASFLLAPSYRHTVNMSAGNAKIGFPAPNFRATAVMPDRQFKDISLSDYKGKYVVLFFYPLDFTFVCPTEIIAFSDRAEEFKKLNCQVIGASVDSHFCHLAWVNTVKKNGGLGAVNIPLMSDPKRTIAQDYGILKEDEGISFRGLFIIDDKGILRQITINDLPVGRSVDETLRLVQAFQFTDKHGEVCPAGWKPGSDTIKPDVQGSKEYFSKQEELLFAAMDVPTHEACRLTSX

SEQ ID NO: 381 - DNA, 741 bp, Macropus eugenii
ctcaagtgtggccctttgactgaatccaaacttcccatctgaggctgcaggttccctacccctggataaggcaatgctttgtcatacgtagaggttactggaacaaagaacttttaataggtgttggagagagccacagtctgattaaatagaggggaaaccttcctaacaatgaaaacatagaaactgtagttcaaaggggactttagatcagttcaagtccctcattttatggatgaaataaatgatacataggaaagggaaatgagtggctctgggtcatttaggaggttccttcgaggacttaactttctatcaatgaccccagtgattgcctgactgaaacaaacctcaaaactgagagaatccatgtggggaatgatcactcaggccaaagtggaggctttttacagggattcagaagcaagactttagccaaaaaaactcccaaaagacccaactcagtgcaaccaaacagcatttgttatattaggcactgacctggattctggagttgatcttcccgaaccattttcctttcgtttactttaaaaagaaaaactgtgttgagtgttgaatagtttatttgtcactgatttatccatcaattggtgatctttatatctatttgtgtatctgtcatgattcagcaaccacaaaaatatcgatatttactttgggaagatgggtagaggaggtctgtgacgtcacagtgattccgtggagctgatggagagtcca

SEQ ID NO: 382 - protein, 32 aa, Macropus eugenii
DSPSAPRNHCDVTDLLYPSSQSKYDIFVVAES

SEQ ID NO: 383 - DNA, 738 bp, Macropus eugenii
  misc_feature (691)..(691): n is a, c, g, or t
gagaaacaagattggagatgcagggttggactggttgtgccaggggatcctgagccctgcctgcaacctgaagaccttgtggctttgggagtgtgacatcacagctgagggctgcagggccctcgcccaggtcctaaagaacaagccttgcttgacaaagctgagcctgatctgtaaccaactgggtgatgaaggggctgagctgctgtgcgaggcactgctggaccctggctgccagctggaggagctgtggctgaggacatgtggcttcacagtggctagctgtgccagcttctgcactgtcctggagaagaatcggaccctgaaggagctgcagctgagcaccaacatgctggaggacgtgggcatcgagcagatgagcaagggactcatgcatcctgactgcccagtccagagtctctggttgggtgactgtgagctctcagacgcctgctgtgagaccctggcttctgtcctcctcaccaaccacactctgaaggagttggacctcagcaacaacagaatgggtgacgtgggcatcaggcagctggtggccagcctccgacagcctgactgcaccctggagcagctggtcctgtttgacatttactggacagaggaggtggacaatgagctgaaggccctgcaggaggccaaacccagtctgcgcatcacatcctgagggcctggncgccctacccacactaagccttggctgtttcttgggttaggtgcctt

SEQ ID NO: 384 - protein, 235 aa, Macropus eugenii
  misc_feature (225)..(225): Xaa can be any naturally occurring amino acid
  misc_feature (231)..(231): Xaa can be any naturally occurring amino acid
RNKIGDAGLDWLCQGILSPACNLKTLWLWECDITAEGCRALAQVLKNKPCLTKLSLICNQLGDEGAELLCEALLDPGCQLEELWLRTCGFTVASCASFCTVLEKNRTLKELQLSTNMLEDVGIEQMSKGLMHPDCPVQSLWLGDCELSDACCETLASVLLTNHTLKELDLSNNRMGDVGIRQLVASLRQPDCTLEQLVLFDIYWTEEVDNELKALQEAKPSLRIXILRAWXPYPH

SEQ ID NO: 385 - DNA, 737 bp, Macropus eugenii
gaggagccaggtgaagccaaagagagagaggccctcaggggggccgtgctgaatggcggcacacccagtactcggataacaccagagttctctaagtgggccagcgatgagatgccctccacaagtaatggtgagagcagcaaacaggaggtggccatgcagaagacatgcaagaacagtgacattgaaaagatcacagaggactccgctgtgaccacgtttgaggccctgaaggcccgtgttcgggagctggagcggcagctgtcccgtggggatcgatacaaatgtctcatctgcatggactcctacacaatgcctctgacatcgatccagtgttggcacgtgcactgtgaggagtgctggctacggaccctgggagccaagaagctgtgccctcagtgtaacaccatcacagcccccggggacctgcggcgcatctacttgtgaacccagacaccaggaccaggctcaagtctgcccccagccctgctcactcaccacccatagagacagacacacatgtgtccacaggactctggagccagagtggagggtgtggagcaacccagcccccctcctgcccctgccccacccaccctggccttctctgtgtgtctgccactgggtggggtggagcactgggtctgggcagacccacagatggacctgcacacaggccacacaagcacatgtaacataggccctgtatgtttacaatgttgtgtagagaagggatg

SEQ ID NO: 386 - protein, 148 aa, Macropus eugenii
EEPGEAKEREALRGAVLNGGTPSTRITPEFSKWASDEMPSTSNGESSKQEVAMQKTCKNSDIEKITEDSAVTTFEALKARVRELERQLSRGDRYKCLICMDSYTMPLTSIQCWHVHCEECWLRTLGAKKLCPQCNTITAPGDLRRIYL

SEQ ID NO: 387 - DNA, 747 bp, Macropus eugenii
cctttctgcatcctctcttctcccccacccgcctgcggtttagcccagcccagcccagcccctctctgctcggtgcagctccgcgcggcgcagcctagcggatccggacccagtgcctcgcagcgcatccccagcccagcctcgcctcgcctcctctagccaccatggcagatgctttcgtcggcacctggaagctgattgacagcaagaacttcgatgactacatgaaatccatcggggttggctttgccacaaggcaggtgggcaacatgaccaagcccaccaccatcatccagatcagtggggacaccatcactctcaagactcagagcactttcaagaacactgagatctccttcaagctaggagtagaatttgatgagacaacagctgatgacaggaaggtcaagtctctcgtcacactggatggaggtaaacttgtccacgtccagaagtgggacggacaggagaccacactcgttcgggagctccaggatggcaagctcattctgacactaacccatggcagtgcagtctgcgttaggacctacgagaaggaggcatcttgaggctggcccacatagtcacctgttctgccaacggctaccactgaactcaccaccagattgcctcatcttccacccgtccccctccccaccccagtgctttgtaccaattgactctggtcaaggaatcctccagaaatggaaccatggtgctgccctggtcctagttgaagcgcattct

SEQ ID NO: 388 - protein, 149 aa, Macropus eugenii
  misc_feature (133)..(133): Xaa can be any naturally occurring amino acid
MADAFVGTWKLIDSKNFDDYMKSIGVGFATRQVGNMTKPTTIIQISGDTITLKTQSTFKNTEISFKLGVEFDETTADDRKVKSLVTLDGGKLVHVQKWDGQETTLVRELQDGKLILTLTHGSAVCVRTYEKEXILRLAHIVTCSANGYH

SEQ ID NO: 389 - DNA, 714 bp, Macropus eugenii
  misc_feature (690)..(690): n is a, c, g, or t
gtagtgagaacttccccagccagatcccgccacgtcgggtcgcagcgggagcctcggagaagtcttgatcctggccaaagagctttccttacccacccctcgccatgagctctcttcacgtggtacacccttactggccccgaaacctccaactcagtgattatgtccccaacgatagaccagtgtggcagatccttgcagtcttcttttctgtctcgggggcgctcctggtgggcacctggctgttgtctggccaggggaggagagggagtggaagtcgggtgccagctctaggcccctggcgtcgcctggcagtctgctggtttgccatgtgtgcctttgtgcacatggtgatcgaaggctggttcagcgtctacaaccaggacattgccagggatcaggccttcttgtcgcagctctggaaggagtactccaagggtgacagccgctacattctagcagacaacttcactgtgtgcatggagacagtgacagcctgggcgtggggcccactcagcttgtgggctgagggtgcctttctgaaacagaggccagagcgacttcccttctccaccttggtattcccttacgccacctctatggcgacgtcccttatttcttcactgactatcgacatggcttccagcatggcgagctgggacatcccctctacttccgggcccactctgncttcctgaacctcttgcgcattac

SEQ ID NO: 390 - protein, 204 aa, Macropus eugenii
  misc_feature (163)..(163): Xaa can be any naturally occurring amino acid
  misc_feature (196)..(196): Xaa can be any naturally occurring amino acid
MSSLHVVHPYWPRNLQLSDYVPNDRPVWQILAVFFSVSGALLVGTWLLSGQGRRGSGSRVPALGPWRRLAVCWFAMCAFVHMVIEGWFSVYNQDIARDQAFLSQLWKEYSKGDSRYILADNFTVCMETVTAWAWGPLSLWAEGAFLKQRPERLPFSTLVFPYXHLYGDVPYFFTDYRHGFQHGELGHPLYFRAHSXFLNLLRIT

SEQ ID NO: 391 - DNA, 715 bp, Macropus eugenii
  misc_feature (696)..(696): n is a, c, g, or t
ctccgggcctgccttgggcctcgaggcgggcagggacccgtgacccccgcgcgccgaccaccccgcgagcctgagggcggagccggagccgctgcagccgccatggccgactactggaaatcacaaccaaagaaattctgcgattattgcaagtgctggatagcagacaataggcctagtgttgaatttcatgaacggggagagaaccacaaggaaaatgtggccaaaagaatcagtgagattaaacagaagagcctcgaaaaggcaaaagaagaagaaaaagcatcaaaagagtttgctgcaatggaggcagctgcccttaaagcataccaagaggatttgaaaaggcttggaatcagttcagatgttacagaatctagcacaccccaagtgaccagcactgccccacctgtctcagtatccagtcagaagaaggaaaagaaaaagaggaaaaaagacctttccaatatagatttagtaggagcttccaaatggatagaaggcatgtcttcagagggttaccgttactattataataccatcacaggagaatctcagtgggagaaacctgaaggattccaaggaaaatttagtaagaaagcagcaatgcctctttgggtagaaggcttaagtgaagaaggttacacctattattataatacagaaacaggtgaatccaaatgggagaagcctganggatttgttccacaagttg

SEQ ID NO: 392 - protein, 205 aa, Macropus eugenii
  misc_feature (198)..(198): Xaa can be any naturally occurring amino acid
  misc_feature (205)..(205): Xaa can be any naturally occurring amino acid
MADYWKSQPKKFCDYCKCWIADNRPSVEFHERGENHKENVAKRISEIKQKSLEKAKEEEKASKEFAAMEAAALKAYQEDLKRLGISSDVTESSTPQVTSTAPPVSVSSQKKEKKKRKKDLSNIDLVGASKWIEGMSSEGYRYYYNTITGESQWEKPEGFQGKFSKKAAMPLWVEGLSEEGYTYYYNTETGESKWEKPXGFVPQVX

SEQ ID NO: 393 - DNA, 710 bp, Macropus eugenii
  misc_feature (329)..(329): n is a, c, g, or t
gccggtgatgagaaccacattcctccatctgatacattgaagcaaactcctaactgcctttctgcttgtttcatgacagtgttattcctttttctataaatatatttttatttaggagaaaagtcagtgattctaattgtatcacgttgtaacataagaaagcactctgtggatcaacctaaatgggtacacaagaatattttttctcttgttgtacaaaagcacattttgttcctttgtatctgtttacaagactgtgaatcaaaaagacgaaactttttcccaagtttttatattttttttaattcgtagctgtggtgttgagctgnagtctacaggaattgggctgactctctttccccataaaagggtctttcctcctgcaccgagtctgacgtgatcgtcctcttcatccaacattattaggttctgttcctgtaccagttcacttacgttcttgatcattaacattatgttcctgatagctcacagtagacgtgtttgtgtgtacctggctttaccagattgttgaatgaggatgagcttatgtgaaaaaaagacacaaaacaaaaaccagcccctgccattaacacattatgtaagagcctggtgggattgtgaaatgttcccctatgttaccccgcatagaaagctttctatattgaatgtacattatacagatcatttaaatgtgtaccataaatttttaa

SEQ ID NO: 394 - protein, 69 aa, Macropus eugenii
  misc_feature (48)..(48): Xaa can be any naturally occurring amino acid
MLMIKNVSELVQEQNLIMLDEEDDHVRLGAGGKTLLWGKRVSPIPVDXSSTPQLRIKKNIKTWEKVSSF

SEQ ID NO: 395 - DNA, 727 bp, Macropus eugenii
ggtggggtgggggtagaaggaagtccaggtgcaggactgtgtggtagtggttcatgggagagaggctaggggcttctcatggctccccactccatgatgggacatgacatctgaaaaagccagtggccgaggaggctgctgaccaattggagcttgtgcagagtgggcaccatgagaggtctggggatgacgtcaaagaagagcccgtggatcctgaagaggcaaggctagtgtttgtggggcaattatccggaaaggacaatacgagaggatccatggcattacagagactgcttgaagttacaactgtgcccagatgggatgggctaccttgaaagtaggggctatgacactcagcttggagtcataaagtcctgggttcacattgttcagatgctatgtgttggagcaaggcactgcctctgcctcaggctccacatctgtaaaatgaatggattggcgtcatttcagagcaccatcataactcctggtgccaccctgccatcatgaagtgacttctgccatgggaccccacccttatggtgactgccccccccaagacatttccagttaagtcctggccatgcgttgttgccccctcctttaaggccaccagctccaaggcacagctcccctcccttacccatcccagggatccccattcctgagcaggatgtgtgtttcttcttcagccccactcaatgccctgcacctctgtgtagtggtt

SEQ ID NO: 396 - protein, 64 aa, Macropus eugenii
  misc_feature (46)..(46): Xaa can be any naturally occurring amino acid
MTSEKAMAEEAADQLELVQSGHHERSGDDVKEEPVDPEEARLVFVXAIIRKGQYERIHGITETA

SEQ ID NO: 397 - DNA, 732 bp, Macropus eugenii
aagaacgtgcgaagagagagatgatcatgtattcgattaccgtagcgttctggctgctcaatagctggctctggtttcgccgctagaggtaacctcagctctctaacgtacttgtcataacagctggaaatataaaacatttgcaaacttctttgtttctgtctctgcattgtatgccgtttgataatccatgcactgaaaatgtatttctctgggaaagaacaaaggacctagaacagaactgaaaggacatcctgttgcttggttgtgtttctttggcttatatttgcagtaacacctacttaaaataacctccctttgcatgttttgtaaataggcctaaatttgtttttgaaaggatttgcttctcttgcctacatgagaacagactgtgctaattctctgggtagtagagagggcttataaagtggatttgcaaaagtatctgtaaaacaagagtagtgtctgtttttgtcctgtgtttgaaacactgttggatgaaatcgtttgtgattagacacttttgcctcagcttccctttagctgacatgaacactttggacattgcagcctggtgccagattcaaaagaactgagtcacatatttcataagtatcttcattaagcacatgtacagaataaattaaagaaattcttgctaacatttcagcagattatccaggggtgtgtgtgacatgtattttcttattttagtcttaattttgcacatgt

SEQ ID NO: 398 - protein, 57 aa, Macropus eugenii
  misc_feature (57)..(57): Xaa can be any naturally occurring amino acid
MQRQKQRSLQMFYISSCYDKYVRELRLPLAAKPEPAIEQPERYGNRIHDHLSLRTFX

SEQ ID NO: 399 - DNA, 730 bp, Macropus eugenii
cgcctgtgcgggcttccgttgacggtgtcgtggactttggttctggccatctcggggctccgggcgttcactggatccttccttgaagattcttgagctcatattaaagagctgaaagaaaatggtgtccaagcaggccttcctctgcagcctgggctcagtctacttgtccctgctcttcgttttcctcctcatggatgtttatgccagacctgcaaacaactcggccttgaaggagaagggaatggacaaggacgagaatgagatcctgccccgagaccacctgaatggtgtcaaaatggagatggacgggcacctgaacaaagactttcaccaggaggtctttttggggaaggagatggaggaatttgatgaagattcagaaccacgaagaaacagaaaaaaactcatggcaatctttgcaaaggttgatgtgaataatgacagaaggatcagtgccaaagaaatgcagcgttggatcatggagaagacagaggagcactttcaggaagctgtcaaagagaacaagatgcacttcagggcggttgatcctgatggcgacggccgtgtgtcttgggatgaatataaagtgaagtttttggcaagcaaaggccacaatgaaaaagaggttgcagaaaagataaaaacaatgaggaactgaagattgatgaagaaaccctggaagttctcgataccctcaaagatcgctggtatcaggctgacacccacc

SEQ ID NO: 400 - protein, 244 aa, Macropus eugenii
  misc_feature (34)..(34): Xaa can be any naturally occurring amino acid
  misc_feature (213)..(213): Xaa can be any naturally occurring amino acid
  misc_feature (244)..(244): Xaa can be any naturally occurring amino acid
RLCGLPLTVSWTLVLAISGLRASLDPSLKILELXIKELKENGVQQAFLCSLGSVYLSLLFVFLLMDVYARPANNSALKEKGMDKDENEILPRDHLNGVKMEMDGHLNKDFHQEVFLGKEMEEFDEDSEPRRNRKKLMAIFAKVDVNNDRRISAKEMQRWIMEKTEEHFQEAVKENKMHFRAVDPDGDGRVSWDEYKVKFLASKGHNEKEVAEXDKNNEELKIDEETLEVLDTLKDRWYQADTHX

SEQ ID NO: 401 - DNA, 727 bp, Macropus eugenii
  misc_feature (690)..(690): n is a, c, g, or t
  misc_feature (699)..(699): n is a, c, g, or t
gggtccctggttgtagctgatgggaggcggtcttcccaccagtatcacagaccagttgcactttggcctccttagttcctgggtagagtggactatctggggcaggccatggccaggctcccagccccaggctctgtgattgtccctgattggcatgagagctcagagggcaaagagcacctgtcatccatccttcgaaagaaccggcggagggtgtttgggctgcttgagaggccggttctgcctccccaggtaacagctgacaccgcaagctacaagatctttgtttctgggaagagtggggtggggaagacagctctggtggccaagttggcaggcttggagatccctgtgatccaccatgaaactgtaggtatccagacaacagtagtgtattggcccgccaaactgcaggccagcgatcgagcggtcatcttccgatttgagttctgggactgtggagaggcggcactcaagaaatttgatcacattctgcctgcctgcaaggagaaaacagatgccttccttttcctcttctctttcactgaccgttcctcctttgaagacctccctgctcagctttctcgggttgccggagatgcccccaacactgtcaagatggtcattggctctaagtttgaccaatacatgcacactgatgttcctgagcgtgacctcacggccttccgncaggcctgngagctgcccctgctgcgtgtgaagagtg

SEQ ID NO: 402 - protein, 207 aa, Macropus eugenii
  misc_feature (197)..(197): Xaa can be any naturally occurring amino acid
  misc_feature (207)..(207): Xaa can be any naturally occurring amino acid
MARLPAPGSVIVPDWHESSEGKEHLSSILRKNRRRVFGLLERPVLPPQVTADTASYKIFVSGKSGVGKTALVAKLAGLEIPVIHHETVGIQTTVVYWPAKLQASDRAVIFRFEFWDCGEAALKKFDHILPACKEKTDAFLFLFSFTDRSSFEDLPAQLSRVAGDAPNTVKMVIGSKFDQYMHTDVPERDLTAFRQAXELPLLRVKSX

SEQ ID NO: 403 - DNA, 701 bp, Macropus eugenii
gaactatggcaccagttactcaggtcagctttgtccttctcatcttcctactctctctgccgcccatcagcccgggaaccctgaagatgcgggtgccagtgaaatctgcagagctcaagagtcaaggaaaggattgctcccatatctggacagacaatccaaaatccccaagcggtgtgtacatcatcaagccagatggggcccccaatgccttccgggtttactgtgacatgggagaagatggtggctggacagtcttccagaggcggaccgggggcaatggcaagcctttggcgtttgaccgagtctggtgggagtacgttaatggctttggggatgtaaaaggtgaacactggctgggcctgtctaaagtttactccctgacgcaccagcctggcactcgcgcccaactgaaactggacttacacaactttgaaaacgagagccgccatgccctgtatgactctttccagatcagtgatgagtccagtttctataccctgagcctgggcaggtactctggaaatgcaggagacgccttcggtggtgaaaattggaaaggagcagcctcccaggtaggcagtgccttcagcactgtggacagggaccatgactcctgtgacccctgcatcagcggtgacatagcctttaatgagtgtagccaacagtatggaggggcaggctggtggttcagcgactgt

SEQ ID NO: 404 - protein, 232 aa, Macropus eugenii
MAPVTQVSFVLLIFLLSLPPISPGTLKMRVPVKSAELKSQGKDCSHIWTDNPKSPSGVYIIKPDGAPNAFRVYCDMGEDGGWTVFQRRTGGNGKPLAFDRVWWEYVNGFGDVKGEHWLGLSKVYSLTHQPGTRAQLKLDLHNFENESRHALYDSFQISDESSFYTLSLGRYSGNAGDAFGGENWKGAASQVGSAFSTVDRDHDSCDPCISGDIAFNECSQQYGGAGWWFSDC

SEQ ID NO: 405 - DNA, 721 bp, Macropus eugenii
  misc_feature (655)..(655): n is a, c, g, or t
ggttcttgtatgcagaagatggacctcatgtcaactacagccagctgacacacttcatgaagtgctcagagcacaatgcagactttgagggtgtggactgtgaagtctttgaagctcctgaacccatgaccatggccttgtctgtgctggtcaccattgagatgtgcaatgctctcaacagcctctcagagaaccagtctctagttcggatgcctccctgggtgaacatctggctcgttgggtccatttgcctttccatgtctctccatttccttatcctttacgtcgaccccctaccgatgattttcaaactaaaggcattggatgtaacccaatggctgatggtcctcaagatctcactgcctgtcattggtctggatgaaatccttaagtttgttgcccggaactacctggaggggtaacctgtttttccctccttcatctctttgaatccgtgtcacagatccagaagatgaaagaaggaagtaaccagccccctggtccccaatacccttcacagccaccttctcctcaccctggtagagaaatacatcttcagtgggtgatgtggcactgcctccccagatcctttcctcaaagccatccctcccccactctcccctctgttccctcttttccaatcgccctttcattnttctgtttataaaacacaacttcaaccctatctccctctatccctcttcccacctctggttccctc

SEQ ID NO: 406 - protein, 139 aa, Macropus eugenii
  misc_feature (69)..(69): Xaa can be any naturally occurring amino acid
FLYAEDGPHVNYSQLTHFMKCSEHNADFEGVDCEVFEAPEPMTMALSVLVTIEMCNALNSLSENQSLVXDASLGEHLARWVHLPFHVSPFPYPLRRPPTDDFQTKGIGCNPMADGPQDLLPVIGLDEILKFVARNYLEG

SEQ ID NO: 407 - DNA, 734 bp, Macropus eugenii
caaagcctacagaacccactcaccaattctacgagagtatctcagtcacttacagagtagtggactccatcaataacaacattaatgaatccaccattgtctcagtcccaaagggctctgtcttcctgaaggtgatggaggcagctcaaacaaaaagcaaaaccaagtttgggttcacaacaaagtcagaacaatggggagaatatatcacctctgttcatggtattaaggccagcagtgaaaacagaacctactggcagctcctgagtaatggtcaaccactgagccaaggagctgagagctttgtagtgtctgacggtgatcatctggaggtcaggctgagtagatattgaaggaagagacattggaagagtcatccaaccatagtatctagcctttccacctatggagtccactctaggattcctttgggaaacaaaagaccccttacctttctccttgcccatcttagcccccatgggaagtcaagcagctctgttctctctccttctcccccttgcctctctctctctctctctctctctatctctccctctctctctctctattccaccccctctctctaccttctccctctccccctcacctttttccccatacctctttctgccctcccctttcccctctccttcacccattcccttcttttacacgctactcactttcttttatccccccccacacttatctcttcatctaatcccgacccacta

SEQ ID NO: 408 - protein, 127 aa, Macropus eugenii
KPTEPTHQFYESISVTYRVVDSINNNINESTIVSVPKGSVFLKVMEAAQTKSKTKFGFTTKSEQWGEYITSVHGIKASSENRTYWQLLSNGQPLSQGAESFVVSDGDHLEVRLSDIEGRDIGRVIQP

SEQ ID NO: 409 - DNA, 723 bp, Macropus eugenii
  misc_feature (646)..(646): n is a, c, g, or t
  misc_feature (698)..(698): n is a, c, g, or t
  misc_feature (701)..(701): n is a, c, g, or t
gggaaacaacttatagtacctccttcagtcatcagctcaaatggttgtccaaacgctcattcaaaaatttgctgcgtagccctcaggcttccatagcccaggtaattatcacaactgtccttggattggttgtaggtgccattttctttgggctgaaaaatgattccactggaattcagaaccgagccggcgtcctcttcttcctgaccagcaatcagtgtttcagcagcatctctgcagtcgagcttttggttgtggaaaaaaagctgtttatacatgagtatgtcagtggatactacagagtttcttcatatttcttttcgaagttgttaattgatttattccccatgagaatgttgccgagtatcatcttcacttgtataacttattttatgttaggactgaaacaggaggtgggggccttcttcatcatgatgtttactctgatgatggtggcctatactgccagttctatggccctggccatcgctgccgggcagagtgtggtgtctgtggccaatatcctcatgaccatctcgtttgttttcatgatgatattttcagggttgttagtaaatctcagaaccgttgcatcctggatttcatggctccagtattttagcattcctcgatatggttatacagnctctgcacataatgaatttctggacctaaacttttgccccaactcaacacancanttccgaacattacttgtgaatc

SEQ ID NO: 410 - protein, 241 aa, Macropus eugenii
  misc_feature (215)..(215): Xaa can be any naturally occurring amino acid
  misc_feature (232)..(233): Xaa can be any naturally occurring amino acid
  misc_feature (241)..(241): Xaa can be any naturally occurring amino acid
ETTYSTSFSHQLKWLSKRSFKNLLRSPQASIAQVIITTVLGLVVGAIFFGLKNDSTGIQNRAGVLFFLTSNQCFSSISAVELLVVEKKLFIHEYVSGYYRVSSYFFSKLLIDLFPMRMLPSIIFTCITYFMLGLKQEVGAFFIMMFTLMMVAYTASSMALAIAAGQSVVSVANILMTISFVFMMIFSGLLVNLRTVASWISWLQYFSIPRYGYTXSAHNEFLDLNFCPNSTXXFRTLLVNX

SEQ ID NO: 411 - DNA, 710 bp, Macropus eugenii
  misc_feature (669)..(669): n is a, c, g, or t
catggatgctcaagctgtacgccatgttgctgatcctaattttcttggtggagttggtggctgccattgtaggatttgtttttagacatgagattaagaacaactttaagatgaattatgaggcttccttgaaacagtacaatgacacattctatgaaagaagtgaggcggtagatactatccagagaactttgcactgttgtggtgtccagagtgccacagactgggaaactactgcctactatgctgagaaaggctttccccggagctgctgcaggtttcacacctgtgtttgggctgataggaaggatctgaagaagcagaatcaggagggctgttttgtaaaagtaacaactgttatgcaatcggaaatgggtgtcgtagcaggtatttcctttggagttgcttgtttccagttgatcggtatatttttggcctgttgtctctcgcgttccatcacaaataaccaatatgagatcgtgtaaactggtgactgacggttccgtacttctctgaccaagctttaggatattatcctcacctcccttccttggaaaatccttcacggccttcaatatgcaaagtgctgaaaaattgtatgaagagactgatccaatcaagacctggcagttatgacttctccaccattcgcctcccccaactcagttntcgaggctgggggaacattaaaagtcatgttaagctaacac

SEQ ID NO: 412 - protein, 236 aa, Macropus eugenii
  misc_feature (222)..(222): Xaa can be any naturally occurring amino acid
  misc_feature (236)..(236): Xaa can be any naturally occurring amino acid
MDAQAVRHVADPNFLGGVVAAIVGFVFRHEIKNNFKMNYEASLKQYNDTFYERSEAVDTIQRTLHCCGVQSATDWETTAYYAEKGFPRSCCRFHTCVWADRKDLKKQNQEGCFVKVTTVMQSEMGVVAGISFGVACFQLIGIFLACCLSRSITNNQYEICKLVTDGSYFSDQALGYYPHLPSLENPSRPSICKVLKNCMKRLIQSRPGSYDFSTIRLPQLSXRGWGNIKSHVKLTX

SEQ ID NO: 413 - DNA, 713 bp, Macropus eugenii
gtgctctagagatgcaaagacaaacctgatgtttggagagtatgaataatcaatgctttctcttcttttcccgtccagactggctttcaccaccatttcacccaaaagcaggctcccccacaaagtgacccaagtagtactctgtgctgtataatggctgcagcagcaggatttggactagtgggattagctcttctattagctgtacgataatggattgtaaactgtttataccaatcttggaaacaaagactgaagagatttggaagaggaccaggtgcagaaaagagaatggtctcagttgttaattaccatctgttaagatgactaaagctggaagaagaaaccagatgaatatggaaccatctcatcaagactgttaaggaacatttgaaagtgttcatcttttggtttttaattttgattaagaacctttcatcttgaacattgccataactgatgaactaacttctctctgaccaatgctttccccgctccccattctcctcataaactggttgactgttcaatggcttttgtggaagggacttgaaatgttggcacttcatattctgtaaaagtagtttatggtatgtcttataaggtgatggatcaaagcctcacgtcttatgcaagatttcaaatgcctttcatggatatctgatacctttccttataaagtattggatggctacagtttagtagacagttca

SEQ ID NO: 414 - protein, 32 aa, Macropus eugenii
MVVKASLDGKRRESIDYSYSPNIRFVFASLEH

SEQ ID NO: 415 - DNA, 701 bp, Macropus eugenii
  misc_feature (674)..(674): n is a, c, g, or t
gatttgaattcatgcagcagaaccaggacgcctttgatgtcatcatcactgactcctcggaccccatgggtcctgccgagagtttgttcaaagagtcttattaccagctgatgaagacagcgctgaaagatgatgggatcctctgctgtcagggtgagtgccagtggctgcatctggacctcatcaaggagatgcgtcacttctgcaagtctctgttccctgttgtggaatatgcctactgcaccatccccacgtaccccagcggccagattggcttcctgctctgcagcaagaccccgagcactaacttccgggagccagtgcagcagctgacccaggagcaagtagagaaaatgaacctcaaatactacaactctgacatccaccgcgcggcctttgtgctgcctgagtttgcccgcaaggctctgagtgatgtgtgaggagaccagtatgtccaccaaggcctctcccagggacttcaagccacaagcgcccattccaggatgccccttttcctgctctgagggtattgactggcactcggcaccccctcccgactgaggacctgcccctcgccagccaccccgcccgttgaccaagtgttaccgaacccaggacatgatcaaggggctctccgtgccatgctctgctgggcgggtggggggagagtacangatgtctgtctgtctctgtctctgtcc

SEQ ID NO: 416 - protein, 185 aa, Macropus eugenii
FEFMQQNQDAFDVIITDSSDPMGPAESLFKESYYQLMKTALKDDGILCCQGECQWLHLDLIKEMRHFCKSLFPVVEYAYCTIPTYPSGQIGFLLCSKTPSTNFREPVQQLTQEQVEKMNLKYYNSDIHRAAFVLPEFARKALSDVEETSMSTKASPRDFKPQAPIPGCPFSCSEGIDWHSAPPPD

SEQ ID NO: 417 - DNA, 723 bp, Macropus eugenii
  misc_feature (522)..(522): n is a, c, g, or t
ccacgtcgtaggggtcctccacggaactaccagcagaattaccagaatagtgagagtggggaaaagaacgagggatcagagagtgctccagaaggccaaccccaacagcgccgtccctaccgcaggcggcggttcccaccttactacatgcggagaccctatgggcgtcgaccacagtattccaaccctcccgtgcagggagaagtaatggagggtgctgacaaccagggtgcaggagaacaaggtagaccagtgagacagaatatgtatcggggttacagaccacgattccgcaggggccctcctcgtcaaagacagcctagagaggaaggtaatgaagaagacaaagagaaccaaggagatgagacccagggtcagcagccacctcaacgtcggtaccgccgtaacttcaattaccgacgcagacgcccagagaaccctaaaccacaagatggcaaagagacaaaagcagccgaaccaccagctgagaatacgtccgctcccgaggctgagcagggcggngctgagtaaatgccggcttaccatctctaccatcatccggtttagtcatcatacaagaagaaagaatatgaaattccagcaataataagaaatgaacaaaagatttggaacggaagacctaagtgcttgctttttgctgttgaccagataactagaactctctgcattaatctatgcagcatggggtttttattatttttt

SEQ ID NO: 418 - protein, 176 aa, Macropus eugenii
PRRRGPPRNYQQNYQNSESGEKNEGSESAPEGQPQQRRPYRRRRFPPYYMRRPYGRRPQYSNPPVQGEVMEGADNQGAGEQGRPVRQNMYRGYRPRFRRGPPRQRQPREEGNEEDKENQGDETQGQQPPQRRYRRNFNYRRRRPENPKPQDGKETKAAEPPAENTSAPEAEQGGAE

SEQ ID NO: 419 - DNA, 728 bp, Macropus eugenii
  misc_feature (626)..(626): n is a, c, g, or t
  misc_feature (714)..(714): n is a, c, g, or t
ctttgagtatgaaaataaaagagagaaagagatagaattctggaatttaaatggcagccagaaaggcatgaattgttccaatctttgtcttggtgacacgtgacatgtgacctgtcttggaatgccagtggggctataggatgagtatgtaagtctttgggatgaagccttggcctttgaatacctctaaggttcctgaattcaagctgatttcctgacctggaatgagctcagtagactatagtggttggtcttggccagctctaaccttgaaatacctgcaagctgataaacagaaaggtttcctgacttcttttgtaaaaatgaagatggtgtaagtgattagaggagtcaggatttgaaggtcaaggacatatcctgctcattcttatagccaagggttttgttgctctcttgagcatatgcctacaaatctttcatgacatctgcccgttgaagggctctggcattttaataatgagccttgggtggcaggcacctgccttttttttttctctgcaccaaaaatgaaaatcagagtttttcctgcccttcagtgtcacaatcaataactcatcagatatctccatgtgtagcagcatctgaatccttaagagcaaatattntgtcaaatacatcttggagagctacatgctatttgcatctccagttctaaactttaataaacactttagtagcatatataatgcctgncactgaagagtagt

SEQ ID NO: 420 - protein, 62 aa, Macropus eugenii
FEYENKREKEIEFWNLNGSQKGMNCSNLCLGDTVTCDLSWNASGAMDEYVSLWDEALAFEYL

SEQ ID NO: 421 - DNA, 724 bp, Macropus eugenii
  misc_feature (679)..(679): n is a, c, g, or t
  misc_feature (704)..(704): n is a, c, g, or t
ctcctactaggccagctagccactctctttacatagccatcagttcctgggtctcaactttagccacttcatatcaggagagtactagcagaagggctacctccagaggaccttgttctagacactgttctgctggcccactttaatctgctaacagttcactgatgagtgaattccctgttctgtctccattgttcaaacccttcagtttgttcctaggcatctctccagtttttggatcttgaaagatgcaaaggatgcttttttatatatgacactcagaaagcttcatttgtcaagtattttttttagaattacaaatgtgtcaaccctgttctctcttactgttgaatagtaagctgttctacaggttgtagctgcactaggcagtggttcaagctttaagggtttagatcagtcacaacaaattcatgcgattcagctattatgtttaccttcatatgacagcagcacaacgtggatggggtacccataatgaactacaaagtgaaggaaactggaaaacaagagaaatcacatatggacactcttctggaggcataccatcttttaaaactcaatgtttagatactttaggaatttttgttttgcattatttttaaatggacatattttcactattgtccttattttttatgactttggactatcttatggnggcatcatttgggtcttgtttttangctttatgtgaaataagacc

SEQ ID NO: 422 - protein, 30 aa, Macropus eugenii
MNYKVKETGKQEKSHMDTLLEAYHLLKLNV

SEQ ID NO: 423 - DNA, 715 bp, Macropus eugenii
  misc_feature (701)..(701): n is a, c, g, or t
ccgggaccggggctagaaggaaggagggtcttcgtacccgtcccgcttgcccccgcaattccgacgggagatgctgtaggctgcccccagccgccggctcggactcctgctccggtcctgaccctggtcccactaaaaggacggagcgatcagtaagtccgacggtccgtccgtctgtccattggtgtgtcccaaggtcctaccatggcggcttcgtcctcctttgggagctttttccttctcttgctgctactaccttcaccgctgggcgccaagggtgagaggtgtgggttcttggaatcctgtccagacttctgttgtgggaactgcatcatcaaatactgctgctctgatgtgctgaagaaggttgatgacagcaacattctgtgctctggtgacggatcaatagagtgggaagaaaaagacgagaagatgacgtttgactttgacaacagccccccaccaggtttcgggactttcgtgggcattggagccaccatctttgtgctcattgtggtcaccatcatcctctgtttaacgtgttcctgctgctgtttgtacaagatgtgccgaaggcccagacctgtggtgaccacttcgactactgtggtccactctgcatatccacagacacaaggtgtgccacctggttaccctggggccatgtaccaaggctaccaacccatgcctgtccaaccagngatgccagttgcgc

SEQ ID NO: 424 - protein, 171 aa, Macropus eugenii
  misc_feature (166)..(166): Xaa can be any naturally occurring amino acid
  misc_feature (171)..(171): Xaa can be any naturally occurring amino acid
MAASSSFGSFFLLLLLLPSPLGAKGERCGFLESCPDFCCGNCIIKYCCSDVLKKVDDSNILCSGDGSIEWEEKDEKMTFDFDNSPPPGFGTFVGIGATIFVLIVVTIILLFNVFLLLFVQDVPKAQTCGDHFDYVVHSAYPQTQGVPPGYPGAMYQGYQPMPVQPXMPVAX

SEQ ID NO: 425 - DNA, 727 bp, Macropus eugenii
  misc_feature (640)..(640): n is a, c, g, or t
  misc_feature (699)..(699): n is a, c, g, or t
cgcgctcacaccgagctccgggcccccgcagcgctagcgccgccgccgccgccaccctcctgccgccgccatgatcatctaccgggacctcatcagccatgatgagatgttctcgacatttacaagatccgggagatcgcgaacgggctgtgcctggaggtggaggggaagatggtcagtaggacagagggtaccattgatgattcactcatcggtggaaatgcctctgctgaaggtcctgagggtgaaggaactgacgccactgtaatcactggagttgacatagtaataaaccatcatctgcaagaaactagtttcacaaaagaatcctacaaaaagtacatcaaagactacatgaaatcaatcaagggcagacttgaagaacacaagccagatagagtaaaaccttttatgacgggagctgcagagcagatcaaacacatccttgctaattttaaaaactatcagttcttcataggtgaaaacatgaatccagatggcatggtggctctcttggacttccgtgaggatggtgtgactccatatatgattttctttaaggatggtttagaaatggagaaatgttaacaaattcagctgattactttgagtcacctgtcattataactggctgctgctntttgtcatctacacaacaccaggacttggacaaacttggactgatgtcatcttgagctntattcatttatttttgaccttgatttat

SEQ ID NO: 426 - protein, 172 aa, Macropus eugenii
MIIYRDLISHDEMFSDIYKIREIANGLCLEVEGKMVSRTEGTIDDSLIGGNASAEGPEGEGTDATVITGVDIVINHHLQETSFTKESYKKYIKDYMKSIKGRLEEHKPDRVKPFMTGAAEQIKHILANFKNYQFFIGENMNPDGMVALLDFREDGVTPYMIFFKDGLEMEKC

SEQ ID NO: 427 - DNA, 722 bp, Macropus eugenii
ccgcatccagggctccaagtggccacaagttcaacctttgatggaaagttgagagacatcgctcctgaattcaaagaacaattacagatactgataccgtttgtgttagatgcgagcaggttgatggaaaaagagatcaacggctccaaagtcagctgtcggggtctgctggagtactttaaggcctacattaagatttaccagggagaaggtctgcctcaccccaaatcaatgcttcaggccactgcagaagccaacaatttagctgctgcggcatctgccaaggacttttattatagcagcatggaaaaggtctgcggaggggagaagccctatctggcatctgacgtgctgcaggagaaacatgaggagttcctgaagcaggccatagaccagtttaagaggagcaagaagatggggggcaaggacttcagccttcggtaccagagtgagctggagcaggagatccaggagatgtacagctacttcatcaagcacaacaggagtaagaatgtgttcagctccttccgcacgccagccgtgctctttagcttcatcctcatactctacatgagctcgggctttgcaggcttcctgggccttgacaccataacccagctctgcaattgcatgctgggcctactgctcatctccctgctgacctggggctacgttcgctactccggccattaccgagagctgggaggtgccatcgactccag

SEQ ID NO: 428 - protein, 241 aa, Macropus eugenii
  misc_feature (241)..(241): Xaa can be any naturally occurring amino acid
PHPGLQVATSSTFDGKLRDIAPEFKEQLQILIPFVLDASRLMEKEINGSKVSCRGLLEYFKAYIKIYQGEGLPHPKSMLQATAEANNLAAAASAKDFYYSSMEKVCGGEKPYLASDVLQEKHEEFLKQAIDQFKRSKKMGGKDFSLRYQSELEQEIQEMYSYFIKHNRSKNVFSSFRTPAVLFSFILILYMSSGFAGFLGLDTITQLCNCMLGLLLISLLTWGYVRYSGHYRELGGAIDSX

SEQ ID NO: 429 - DNA, 723 bp, Macropus eugenii
  misc_feature (664)..(664): n is a, c, g, or t
caaatactacaaaactgaaaggtttttaagcactttctagaaaaattaaagcttttaagttaagctctccattaaggtgtgctggagctggaaaaacggctggtagttatgttttcttttctcaaacagactttaaagctacagatttccagatgatttatgtacttttgcgggagtattaagttttcctgagatttttatgggtgggggtagatgactatgagttgtttctaagacctttcccccccacagatgactagtcaaaatgggtagaagcattgattcactgctgtgtcagagatggctgagctcagcttttttaccttggaagaattggaaaatgcagcttgtgttgctaaagttcagcccaccccctcctggagaagagccaataggccagtctggcaagtgaaatgttcaggaagtccaatgagtcgatgaaggcctagacggtggtattcttggggccttgggggctggggtaggtaattgtttatattttcagattactgaaagccagagagagcctaataacttagacggaaaaaaaaagaaaaagccattttcagctttcaagttggcaagtaattccccaaatatggtaaatcgtccattttaagagtttgcattggggaagtacattaagacccttgggtccctgganaatgttaaattgttcaaggagagaggaggagaggtaaagttcctaaattgaacttttaa

SEQ ID NO: 430 - protein, 46 aa, Macropus eugenii
MAELSFFTLEELENAACVAKVQPTPSWRRANRPVWQVKCSGSPMSR

SEQ ID NO: 431 - DNA, 725 bp, Macropus eugenii
ccatgagcggggagcccggggccgatctcgaggagcccctgccgggcagtggggtccgcatcgtggtggagtactgtgaaccctgcggatttgagtccacgtacctggagctggccagcgctgtgaaggaagagtaccctggcatccagattgagtcccgcctcggtggcaccggagccttcgagatcgagatcaatgggcagttggtcttttccaagctggagaatgggggatttccctatgaaaaggatctcattgaggctattcgaagagccagtagtggagaacctctgcaaaagatcaccaatagccgccccccctgtgtcatcctgtgaccctgcaagatctccagttccctcctgggtcagggctcctctcctgtgtcctggatgcccctcccacattgggatcctctccatcttagcaaaatccttcctcattggagattaggataagagagcccatttcactgaccaagcatcggttcatccccagcaaccctcttggtcttgtcacctctcttcccactccctctgtgctgagagatcccagccacttcttggtgaagccaggggcaagagctttggagattccaggtacaagcctggctgctatgtccctagagagggaaccttcaacccaagctcagagtaggggaagaacccctaaccccacccccagtggttcatagaaaattcaccatctaccaatgtgtgcacgcacac

SEQ ID NO: 432 - protein, 110 aa, Macropus eugenii
MSGEPGADLEEPLPGSGVRIVVEYCEPCGFESTYLELASAVKEEYPGIQIESRLGGTGAFEIEINGQLVFSKLENGGFPYEKDLIEAIRRASSGEPLQKITNSRPPCVIL

SEQ ID NO: 433 - DNA, 720 bp, Macropus eugenii
caaatcagctgtacattagtagcacctcagtattaaatacaaagcttcaaaaacaaaccaaaccagtaaaatcaggtcccagggtctctggtgaagtaaaggcatttctcaagaggggaaaagtgtgtgtgaatgtgaaccgcttcatccatttaggaagaattattccaatatatcttcagattcagacaagatgatcttgccgtacagtcaggtaatagcccataggatcaaaaagaaagtctttgggtaatggttctattggacacaaagctattgactgatgaaggggagggtagaagaattccaggttgaggggggccaaggtactgctttcccttcagcaagcccccacatcggctctgtttgcagtaacagctgatcctggaaaagttcttggctggcacaagcacctctcctcttgaacgagtttatttgacctgacttcatgtctcagaaacccaaatcaatgaggttttggggttctgccttggcctaacccccagaaatttagggtaatagtgggcatttccccccaacccatgtttgtttgaggcatttttatcattaaaggaaagaagtaactagtactttctaagtccatgctcctgatgaaagggttggccaccatctccactagtccccttacctgctccttttgcttcctttgctgctgcttcattggggagagcaaaggtgcagtgggtcctggcagggggg

SEQ ID NO: 434 - protein, 177 aa, Macropus eugenii
  misc_feature (130)..(130): Xaa can be any naturally occurring amino acid
PLPGPTAPLLSPMKQQQRKQKEQVRGLVEMVANPFIRSMDLESTSYFFPLMIKMPQTNMGWGEMPTITLNFWGLAKAEPQNLIDLGFLRHEVRSNKLFKRRGACASQELFQDQLLLQTEPMWGLAEGKAXTLAPLNLEFFYPPLHQSIALCPIEPLPKDFLFDPMGYYLTVRQDHLV

SEQ ID NO: 435 - DNA, 717 bp, Macropus eugenii
  misc_feature (622)..(622): n is a, c, g, or t
  misc_feature (706)..(706): n is a, c, g, or t
tgcttttcatagtgcagcaagtctggagccaattaaatcctttgaagctcctgctcccatcaattctgcatcgcttcatcctgagaaggaatttcttgttgcaggtggtgaagattttaaactttataaatatgattataatagtggagaagagctagaatcctacaagggacactttggtcctattcactgtgtgaggtttagtgctgatggagaactatatgctagtggttctgaggatgggacattgagattatggcagactgtggtagggaaaacgtatggcctttggaaatgtgtgcttcctgaagaagagggtggagagctagcaaaaccgaagatcagttttccagagacaacagaagaggagctagaagatcttggctcagaaaactcagattccatctatagttcaactcctgaagtgaaggcctgagcacctggcatatgccacagatgttatgccacatgtggactaaaacaagcagcaattagcaggagccttacagagttaccctctacgtaaggcatacttgggcagtaagtgatggggtatgtgacagctccatcgttggaactagcttggtgttgtctctaagtgcaaactatgagaatatcaaanaatggcgggtagaattgtgctcatttagtccactatcctactgcctttttgaatgaatatgtgcaagccaacatccaaattctnctatttcaatt

SEQ ID NO: 436 - protein, 174 aa, Macropus eugenii
  misc_feature (154)..(154): Xaa can be any naturally occurring amino acid
AFHSAASLEPIKSFEAPAPINSASLHPEKEFLVAGGEDFKLYKYDYNSGEELESYKGHFGPIHCVRFSADGELYASGSEDGTLRLWQTVVGKTYGLWKCVLPEEEGGELAKPKISFPETTEEELEDLGSENSDSIYSSTPEVKAEHLAYATDVXATCGLKQAAISRSLTELPST

SEQ ID NO: 437 - DNA, 715 bp, Macropus eugenii
  misc_feature (681)..(681): n is a, c, g, or t
ttgattcccagagtagtcagtatttttcccatttgttaggaaccaggcccacagcagtaaagtaatttaatatattaggattttagagttggaaaggaccttatagagcagctagttcaataatctttgtttcacagatgaagaaaattagaccttagaaaggttaaatgatttacccaaggtcacacaaaaaaatagtgacatcttgactaggatattgtttcttaattccttgttaaaggctctttccatcctacgccatggcctgcctggagtggttcctgaagatgactgaaaacattggaggctggccacagtaatactagggagccaaaagaactctgattccctctgataattcaaagtctagaatactgggccttgaagaagttgccatactgctggggaggaatcctaggcttagagtagcccagaagaaggaagtcaattgactatcagattctagttcttggaaccctcaggcatttcctattcatacctgcctgtatttccagctggctgtcttttccttttccaaccttgccagggcatctccaagcccttagagccttcagtgggaggaaatgtcagagaatgaaaaccacccagtcaagaattaggaaggcaactcagctggacgtttgaaactgggggggaggggagaggtgggtaggttgcttncccttcgttccctctccctacccttgctttaaat

SEQ ID NO: 438 - protein, 19 aa, Macropus eugenii
MACLEWFLKMTENIGGWPQ

SEQ ID NO: 439 - DNA, 730 bp, Macropus eugenii
  misc_feature (355)..(355): n is a, c, g, or t
gttcgggcctgcaagtgggtgcccgctactgggctcgcctcctgccgctgctgaggccccgcgccggcgcgttctgctctggcgcgaagcccacgtttccgcaggcgcagagccggccgggccggggcttcggtcccgcctcggccgtgggggctcgcgggctccggagcggagcgcggcgggacgaggccgacgcccgagcggagcgggccgcggcaggtcacaccgggcccaaactggacattgacctgcttgtgtctctcttgaggcaagaaaatgcaaaagatatttgtgtgatccgggtttctccagagctgaaatacacagattacttcgtggtagtgagtggaacctncccgagacacttagcggccatggcccagtacctagtgaagatgcataagttcctgaaatccaagagtgaggcttttgttcgaattgaaggaaaagatgcagatgattggctgtgtgtggattttggaagcatggtgattcattttatgcttacagggacccgagaaacctatgaattggaaaagctatggaccctggggacttatgacgatcacttagctcagattgcatcagagtcactgcctgaagacttcatccttggtttccaccagaagaggagccttcagtgtgttctgcattagaggccgagagagaataaagagcgagcttttgagcaactagaattgggcagtgttctactatgacagtgcagctt

SEQ ID NO: 440 - protein, 217 aa, Macropus eugenii
  misc_feature (118)..(118): Xaa can be any naturally occurring amino acid
SGLQVGARYWARLLPLLRPRAGAFCSGAKPTFPQAQSRPGRGFGPASAVGARGLRSGARRDEADARAERAAAGHTGPKLDIDLLVSLLRQENAKDICVIRVSPELKYTDYFVVVSGTXPRHLAAMAQYLVKMHKFLKSKSEAFVRIEGKDADDWLCVDFGSMVIHFMLTGTRETYELEKLWTLGTYDDHLAQIASESLPEDFILGFHQKRSLQCVLH

SEQ ID NO: 441 - DNA, 728 bp, Macropus eugenii
aaataaatccctccttgggagaaacttgcccacaagccatagatatcttgttatacacaccaggacatcttgatccagcagaaaagattgaagatgctcatcccaagctgtggtgcgctttaagtgaaggcaaagtgattgtgtttgatgcgtcctcctggacaatccatcagcagtcctttaaagtaggcactgccaagttgaattgcatgctgatggcagagcagaatcaagtctggatcggctctcaggactcgattatttacattattaacatccatagtatgtcctgtaacaagcagctcactgatcatcgctcgagcatcatggatttaattgtagaagatggaaacaagggatctagtagtgaagtctattcatgcagtttggatggagtaatcattgcttggaatgtcagtaccctgaaagtgatcaggagatttcacctgccgtgccaaactctaacttccattaagcttcatattggccgcctctggtgctgtataggctataccatcatatctgtgacatcaaatggatctccttcttaagaactgaaagttgatgagcttttaaggaaattttcctccttttcttcttgttccacgcttttccggagcaatgacctgtcttgacagtttgttctggacacatagacctatatgtcttgatcctaattgacttctccaggtctctctataaatccatcttaattctgctctagattt

SEQ ID NO: 442 - protein, 182 aa, Macropus eugenii
INPSLGETCPQAIDILLYTPGHLDPAEKIEDAHPKLWCALSEGKVIVFDASSWTIHQQSFKVGTAKLNCMLMAEQNQVWIGSQDSIIYIINIHSMSCNKQLTDHRSSIMDLIVEDGNKGSSSEVYSCSLDGVIIAWNVSTLKVIRRFHLPCQTLTSIKLHIGRLWCCIGYTIISVTSNGSPS

SEQ ID NO: 443 - DNA, 728 bp, Macropus eugenii
  misc_feature (674)..(674): n is a, c, g, or t
cctcattggctggggagtccctgccttgttcatcactgcatggacactcaccagactctatttggacaacattgggtgctgggatagcattgaatcatcatactggtggatcatcaagggacccattttggcttctatattggtgaacttcattttctttgtcttaattattccgaattctggttcagaagctacaccccccagacatggggagaaatgagagcagccaatattcgagactggccaaatcaacactgctgctgattccactctttgggatgcactacatcatgtttgccttcttcccagacaactttaagaaggaagtgaagatgttctttgaacttgtttttggctctttccagggctttgtggtcgctgtcctctactgcttcctcaacggggaggtccaggcagagttcaaacgtaaatggcggcggtggcacctggagcgattcttgggcccagacctcaagtaccaccacccatctgtggccagcaatggttccaacttcagcacacagatctccatgatgacgcggaccagccccaaggaccgacgctcctccagtttccaggctgacttttcactagtctgaccaggcacctctcaccccagggtccctaaccctcccctatatatcagagtattggtcacagcaaggggcaggcanaaggccctcaagatgagaagactataagctagaggaaagcctgcctcagacagg

SEQ ID NO: 444 - protein, 199 aa, Macropus eugenii
  misc_feature (80)..(80): Xaa can be any naturally occurring amino acid
LIGWGVPALFITAWTLTRLYLDNIGCWDSIESSYWWIIKGPILASILVNFIFFVLIIPEFWFRSYTPQTWGEMRAANIRXLAKSTLLLIPLFGMHYIMFAFFPDNFKKEVKMFFELVFGSFQGFVVAVLYCFLNGEVQAEFKRKWRRWHLERFLGPDLKYHHPSVASNGSNFSTQISMMTRTSPKDRRSSSFQADFSLV

SEQ ID NO: 445 - DNA, 720 bp, Macropus eugenii
  misc_feature (581)..(584): n is a, c, g, or t
  misc_feature (587)..(592): n is a, c, g, or t
  misc_feature (594)..(594): n is a, c, g, or t
  misc_feature (596)..(597): n is a, c, g, or t
ctccaaacgcctccccctctcaccacagctgcctgcccttctttattccttccatgatgaaccccaccctagagcaggagctgccttctccctgaagttcacccaaggctggattgccacttgccagtccgccatatttggaattcttgttcatcaaatggttgtgcctggagcctttggtgtcagtcagctcaaagatggagtaattctgcccttagtagttatcagtaatccaataattttggagcaggcaggaattctgtttgtgaaccgcatttggccaaatgggagacctcagtgaggggctccccacataggtggatccctcccccaaccctgttgtctatatttgtatgaattagtgtttttgttgttatttttcctttttttgtattcccagcattgggcacagtacctggcacatagtaagcacttagtaaatgcctgttgattgaagaaagattcccccctactgggccatgagagcacagtagatgtcaaaagcaagggctttctacctccccagttgggaatcacatagactggttccagctggtccccagtgttgggttgagaggtgnnnntcnnnnnncntnncacccagcccccctgcagccattgcattggctgccctgtctgtgcgtgtgctttgtttgtgatctcccctcctctttttctctctaaatattttttccctgtgctgattgttcctccacatgt

SEQ ID NO: 446 - protein, 99 aa, Macropus eugenii
SKRLPLSPQLPALLYSFHDEPHPRAGAAFSLKFTQGWIATCQSAIFGILVHQMVVPGAFGVSQLKDGVILPLVVISNPIILEQAGILFVNRIWPNGRPQ

SEQ ID NO: 447 - DNA, 704 bp, Macropus eugenii
cgacccttagacttcccaacttcaccgccttggggccaggaaattgaaatatctcgtcaggagtggggggaagacggtggctcgggtgggaccgacgccagggatggcggagcgcgaggatggagcaagtgtccgggctgctttcctgggcgctgagcagagtcccgtggctctcgggccgctctgagcggggagctgcccggcagccccggatcatggaagagaaagcgctcgaggtttacgatctaattcgaaccatccgggacccggagaagcccaatactttagaagaactggaagtggtaacagaaagttgtgtggaagttaaagagatacatgaagaagattatctggttattatcaggttcacacccacagtacctcattgttctctggccactcttattgggctttgcttacgagtaaaacttcagaggtgtttacctttcaaacataagttggaaatctacatttctgaaggaacccattccacagaagaagatataaataaacaaatcaacgacaaggagagagtagcagctgcgatggagaaccccaccttgcgggaaattgtcgaacagtgtgtcattgagcctgattagcagcttttcggaaagtcaccaaattgtaatcatttgatatatttgtttaactctttgttaaatagatgcctttttgtttattacttggacagtttgtacctc

SEQ ID NO: 448 - protein, 175 aa, Macropus eugenii
  misc_feature (166)..(166): Xaa can be any naturally occurring amino acid
MAEREDGASVRAAFLGAEQSPVALGRSERGAARQPRIMEEKALEVYDLIRTIRDPEKPNTLEELEVVTESCVEVKEIHEEDYLVIIRFTPTVPHCSLATLIGLCLRVKLQRCLPFKHKLEIYISEGTHSTEEDINKQINDKERVAAAMENPTLREIVEQCVIEPDXAAFRKVTKL

SEQ ID NO: 449 - DNA, 732 bp, Macropus eugenii
  misc_feature (687)..(687): n is a, c, g, or t
  misc_feature (718)..(718): n is a, c, g, or t
cttttttatttttgtttttaaaagaagtgaatttacagaatcagccagaattgctggagtcactttgatccaccatgtagatctgtatttagcaacatttggatttggagaagtgcgccaatgatgttacagctgtgtaataaaatttgtattaaaaagtaattgctatttgcatcacagtgtagctggtttgccaccaccttcccacatactacagatgaaaccttcagcctgagactatgaagcacagaggggctcccatttggactgactgcaatagagttaggggaaaaaaaatcaaccaaagaagactaaaggctgaacttgactcatcacctgaatagcccacctgtggtttggcctccctccccaagactgctaactcttctccaggctcgtgcaaagcaggtgtatcacttggttccaaaaaactgtcattgtcgcaaagctgtagtctctggggctgtgcacaattgtttccatgcccagagtgagaagcaagagtccggcccagcttgcactgtggtgcttccgtgatgatgggaacattggcttgaggggctattacacaaattttctgtttcttccaggaaaggtaaccccttcccttctgttcatatgctgagctcatgatgtacagatctgaatgtctgtcggtcttgcttttcctcttctgacaggtgtggngtgaagcctcgtttcccttcaaagggatgantttatttgcttttg

SEQ ID NO: 450 - protein, 244 aa, Macropus eugenii
  misc_feature (5)..(5): Xaa can be any naturally occurring amino acid
  misc_feature (15)..(15): Xaa can be any naturally occurring amino acid
  misc_feature (141)..(141): Xaa can be any naturally occurring amino acid
  misc_feature (206)..(206): Xaa can be any naturally occurring amino acid
KANKXIPLKGNEASXHTCQKRKSKTDRHSDLYIMSSAYEQKGRGYLSWKKQKICVIAPQANVPIITEAPQCKLGRTLASHSGHGNNCAQPQRLQLCDNDSFLEPSDTPALHEPGEELAVLGREAKPQVGYSGDESSSAFSXSLVDFFSPNSIAVSPNGSPSVLHSLRLKVSSVVCGKVVANQLHCDANSNYFLIQILLHSCNIIGXTSPNPNVAKYRSTWWIKVTPAILADSVNSLLLKTKIKK

SEQ ID NO: 451 - DNA, 714 bp, Macropus eugenii
tgcgagatgaagctgagagcttcatgcatgcccagcttgaggtcatggtaaagtaccccccagtggaaccttcacattttacctctgtccaggccaaggtacctgataagatgggctttgatgaggtctttatgattaatcttaaacgtcgactggacagacgtgatcgtatgctgaggactctctatgagcaagagattgaatgcaaaattgttgatgcaatagatggaagagccatgaacaccagccaagtggaagcactagggattcggatgctgccaggttatcaggacccctaccacggccgcccactcaccaagggggagttgggctgcttccttagtcaccaccaaatctggaaggagattgtagagcgagggctggagaaatctcttgtatttgaggatgacctccgttttgagattttcttcaaaaggcgcctgatgaatctgatgtatgacatcgaggaagaaggtctggagtgggacctgatctatgtgggcaggaagcggatgcaagtggagcacccagagaaggcggtgccacatgttcggaacctggtagaggctgactattcgtactggaccctggcctatgtcatctccctccagggagcacagaagctgttggctgctcaacccctctctaagatgctccctgtggatgagttcctgccagtgatgtttgataacacccagtgtctgactacaaaga

SEQ ID NO: 452 - protein, 238 aa, Macropus eugenii
  misc_feature (238)..(238): Xaa can be any naturally occurring amino acid
RDEAESFMHAQLEVMVKYPPVEPSHFTSVQAKVPDKMGFDEVFMINLKRRLDRRDRMLRTLYEQEIECKIVDAIDGRAMNTSQVEALGIRMLPGYQDPYHGRPLTKGELGCFLSHHQIWKEIVERGLEKSLVFEDDLRFEIFFKRRLMNLMYDIEEEGLEWDLIYVGRKRMQVEHPEKAVPHVRNLVEADYSYWTLAYVISLQGAQKLLAAQPLSKMLPVDEFLPVMFDNTQCLTTKX

SEQ ID NO: 453 - DNA, 710 bp, Macropus eugenii
aaaaattcatgaataccatagagaaaatattttagaattaaatgtttcttatatttatgtaaacttatgtgacttcatttatacagttacttactttttcatgtgtatccagattataaatatcttttccaatcaactcatgaggttcttatacttaatttgttagtcaactgaatgtactgtaatgcttgtaagtataatcccatgagcaaatagggttttttgtaaattatgcagttattgtaattatcattgtttaattttttaaaataataaacctgacagaaatgaggattttacatttgtaaaaagtgccctattaccaaggagcaggcatcatcagtggcatttgtaagctgatgcttcagcaagcaagccacagcagccgtgttgaaacaatcagacttttcattgtaagcagttatggtgtgtgattaattactgatcacagctgatctttttctgaaaggaaattttccattctgtaccatggactgattcctaaattttgtattttaaatatcgccttctttactaaaatttgaactgacaaccatttataacactatggagtccctctaaacaaccggctcacgatgccttgcgaaccgaagctctcgctcttggataactggtcctagcgactgcggataaccctgcacagagaacttttagccagaaacgacacactctgacagggtgccatcccc

SEQ ID NO: 454 - DNA, 383 bp, Macropus eugenii
gaaaggtacagttttggggttccccaaccttgagttcacaatgacaggagggagctgctgccctcttacccctctcagactcctgagcttaccaggggctgatggtttggaacttgggtggaggggactacaggcaagctcctgggggggggcagggttagattggaatgagttggttagcgccatgtgccgcccccccatccagattggccatgggcccctccccccaacttttcttcacgtttcttaaaggcattttggttttttttaatctgtacagcgagagcgactttttctgtcgaataaaaatgagaaatgcacaaaaaaaaaaaaaaaaaaaaaaaaaaaaaaaaaaaaaaaaaaaaaaaaaaaaaaaaaaaagg

SEQ ID NO: 455 - DNA, 743 bp, Macropus eugenii
catgagcccaggcttccagcaaaggagaagcctggcctcaccagccttctacccttcacccctactctccttcccccaacagacaccaaagtcccagccagactccagacttccctgtagctcatgggacttggtgtgtttttgctctggccctcattgtggggcaggatgcacccctagctactgaggggggagcaggagagctcctcaaagcagggaaggtattggccctgcacccctcgcccctgcaaacccaccccttcctgtggcctttgtttgcccctgcggggtacaaggggtgggtgccagcacaatcccagggcaagaaccacttggctgcactggaaggatttttttttgggggggggtcaggggcgccgcctcctcgatactgccaacactgacacacaccgacaagacccccccctaaagcaccaacctgagcgctcctggccctcccgcccgttctccggcaccatcgagcatgcgcctcgcatcaacagggaccagtcgaccctctcctcctcccctgccccctcgccacgcaccacacccctctcccccctccccccgagacccgcccgccctccccgcacccactccctttctctccacactgccggaccccgcgctccccctcaacctctccctatatccgcgaccctctccacccctccgcctcgcccaccccccctcccgccacccccacttcccccactccccttactcccgaccctaactca

SEQ ID NO: 456 - DNA, 555 bp, Macropus eugenii
ccaaattgcaattattcagtttaaatatttcattaatttcagtcaaccaaagttagctcagtagcttatctcagttatgactataatacagtacatgtaaattaagtgtgtgtatactgtaatcgtgctatttttatcattgaagcgtttgtaaactagagtaataatacccttaatgtgagggtttataatggtgcttattaagaccaactacttgttaactatacaccaatctaatgatgaaatgtctgtgacttacccaaaactgcactgaggtcaggaagggccagtaaacattctcagccatcagatgaccctcagtgtccaccgtacatcttaatattgtgtaacatgtgccgagagttcccataatcatccttatcaacaagggctcgatgtcatgaatgtcacaataaaacagtctctttttttagtttaaaaaaaaaaaaaaaaaaaaaaaaaaaaaaaaaaaaaaaataaaaaaaaaaaaaaaaaaaaaaaaaaaaaaaaaaaaaaaaaaaaaaaagggggggggcgttttaaagtttccttggg

SEQ ID NO: 457 - DNA, 719 bp, Macropus eugenii
gacaattgaagatggccccaataggaattttaaatatatactgacagaaggggtgaaggaaaaaccccttctaactatcccacagacatgaacaaagaagaattttcgaaaccgttttaagtgttgaaagaaagattcaagtggagtgagcatacatagacaaaaaccaaacatttacaaaagaccatctattataaaatagcagacgggcttcccaaatacagaaaataacttgtttcagtgctccaaatatgatgaagtcaatcattaaaatatttgaactgtgttggaaaaaaggtgttaaaaattaaggtttttgttttttttttaaatagtcattaggaaaattcatttcaggctaatgagcaacttgggtctaagtcctgtctgtgaggcaaactggcagtgtaagtcacttaacaagtgactgtcaagacatttaacctcttaacgtctccagacaactttcaaagattgttgtactcatccttcattgccaaagaccataccatcagagaaatgatgacatgacttgtacttgactttgctttgagagagggaggcccttaaggccaaggtctttgcaggtactcacttagggtgaggtaatgcccattcgttgaacaggcctgtttaagaagtagccagggcacagcccctttaatcaggccaagaaaaagaaaaacatcaggctgggaggtagacagcaaaatactact

SEQ ID NO: 458 - DNA, 710 bp, Macropus eugenii
gtttatatttttctcaagaaattctgaagattataatattgtcactcacaaaaaacgatctcagtacattttcaatagtcataggtaactagtgatccaagggctattaccttctaggcactttgattctgataatgcctgtctcagatttaagggcaaaactttgggtaaataaaaactgggagtggggagaggattgtgggctgggtggtgggacaaccagtgtcatggtttccttgtatgtgaagtatagaatcctttatgaccatcctgaaaggacggttatgaagataaactggtctttaaaaaactccttgtcaatacaatatagcaatgataaaatgaaaagttacacatgtgtgtccttttaaaacaagttagctcttcattctggtgattcccattaccaagcagataacccatttacttgtagtctcaacagttttgtaagcagttctgttgacaggtttctgaacgaaagagctactatatatgacattggattaggttctccttgaatcatcaaactataaagctacaagatgccttgccatccacccagtgcagaagttttaaattgtcttatctctggtgttggctgcacacaatataaacagtagttccatgagaaaacttgatttcagtgatactttctctttaaatactcatgtgataccatgtacgtgttcaaatattactatgtatggcag

SEQ ID NO: 459 - DNA, 734 bp, Macropus eugenii
  misc_feature (655)..(655): n is a, c, g, or t
  misc_feature (678)..(678): n is a, c, g, or t
  misc_feature (711)..(712): n is a, c, g, or t
  misc_feature (724)..(724): n is a, c, g, or t
atgtacgagaacttaatggagagcactgtgttagtatgtgttgtgtgtttgctttaacctatgcttcatctagaagtgaaatgaggtgttatgtttctcactatgaatattcatcattgctctagtagttctgtgatctcatctacatgaacaaaccctcaaaaacacagattgcaccctatcatgcctgtctgtgctgtgtgattattgttcatgtccttccttaaactcaccaaagaagatctaaaacaaatgctaaatcaaataaggtgtagacaactgaattataaaggcaagtaaatttgttcagtagtccacgtgctttcttaatttttctgtaccccttttcttactgtgtatacaccattactttatctatttgtaactcctagctatctctgaattgacctaagtataaggtaaagcacacaaccttttcacatttcagacatcaaaatatatgaaatatgtggcttcccaaaatttttacctcctttcacactggttactttgggaaatttagcaatggtagttacataggcacaagatgaaaaaccaatttcttcactcctatttgaaaattgccgtgttaaatgatgctgtattgtaaatgatgctcctaactgtcaagggtcttgaatttgggagtcatganaagccaggttctaggcctaattntatcacttactagctgcgtgaccttgggcaagnntacttaactctntaagtcttag

SEQ ID NO: 460 - DNA, 720 bp, Macropus eugenii
ccctacttcctcccaaatctccttctgtctctcttacataacctactaccaatccctctgaatgccttcacctgtataaagtgttggactctctcctccggtgtctgtactgtgtacacacatccccctgagaagcacaaggagacgacgtacgcattgtaactctctcactctcttggacataaaggaagctgggaatcataagctttgcctctttctggcctgccccccaacctacctatgcttagagcactctctgccctccctgtagccttaaggcctcttccttcctttccatcagtcccattatcccccttctgactaggactttcctcctgggggaaggggtggacacagagaattggcacttagctcagaggatagatattccctcttggccccaaatcagggtgaattatagatgatggaatccctggagcatggagataaggtgtcagggacagcgtaagggtgggaaacaacccatagtttctaaaggtagccactgaaaaatatataggtggctagaagatagtgtgtaaggccctcatccccaaggctatgtcggctagggtcaaattcttcgcattactgactacccatgctgtgttacctggggttcaagccctgtgcctccatcgctcacattttagggacacggcttgactttataatgagtatacgacctaaaggagccgttggagcctcatgctgtccacg

SEQ ID NO: 461 - DNA, 739 bp, Macropus eugenii
  misc_feature (593)..(593): n is a, c, g, or t
  misc_feature (703)..(703): n is a, c, g, or t
  misc_feature (713)..(713): n is a, c, g, or t
ccagggcagctttcagccagccccaggactctccatcgctgaaacaaagggcccaaagatgaccctcccactgttgggtcacattccccagcccaggcagccatattctcccctagcctctggccttttctgccatagcaagggctaggggcagcagacttgccaaagaaagaccagggccttacttaagacaaagtggaggcaggtaggtgggtgtgttcaaagcaatatgaatggaagcacacggtaggtgcagcagggtgggctctggggatgaatggaagacttccaaggcagtcataataagcactagcacttagggagctggcctttatgggtgccaaggctcctcacgaagcagtgagctggtccccctcctagggtggggcctcagagttcagaccagggaagggcaaactttatccttggtgtcccaaacaggtcaattcctcccccccacacctgctgcccttcagggacagagccagagccccaaggagcaagccccactcacatacacagctcatcggagccagctgaggagagggtggttcccccctccccaaatccatgcttgctcacatgtgccctgnggaccagccctggtgcagctgggtgctttctgaggagggagatgcattaagcccagagcgggagaagccccactcagggagcccccagcagtaaatactgaaggggagcntcactatggngctaaagggtagggaggggacagtaa

SEQ ID NO: 462 - DNA, 703 bp, Macropus eugenii
gtttatttgtgaagtcagagactaaacagttgagagaatgatgaaaaagtcaaacatttagagccatgccatctttctcaatagtagtggttggcagtgagaatcataaaaaatgagactgaaagacccaactgaaataattgtttttggttgtgcctcacctcttgccttaaaacttaaggaaaatagaagccattttgctcacatttcatagtcccactatttccatatgtatcttccactctgtgatgggagttcccttaaaattgcacaagagcctttcaggggaaggttactggagaaaggagctgggagagagaagagatgtatggtgatcctaggatcctagctcagttgagataaggggagaaaagttctcaaatcactcctcaaaacagtactgccaagcctaaaaggggcagactgggttaagaatcagtggtttttttgacctccttgttatcactcattatcagaaggtctctgagaagatagatgctgttctgttctgaaaaaatatgacaactaataggaaatcatttcttacagatattgaaataagtctcttcatggagtagtgctaactctgggtagcagtaccaagggttttggggagttcattatttagtgattagatgttggagactgtacacaagtttaatggagtccctgtttggttccactaatcataacaatatctttt

SEQ ID NO: 463 - DNA, 709 bp, Macropus eugenii
ggttatttttaaacgatattattcttagaatggaggtgttaatttattatccatggtgagctcttacaaagtaaatgtgcaagaaatattcagggaaagtggtatttataattagcaaggaagatggggacccaaggtagcaacactaagcatgttcttcctccttgtgactgactgcatctgccacgacttagtactgaagtatataaatgcctttaattataaaggcacaaatgcagcagatatggtatggattagtttgagtcagccagtagctacttttgaactcctttttccccagctgaagtgaggggaaaggcctttttttccaaaagctctagccaaattttactaagttcccaagaagcatgtcctgtcctcggagcattattccctctaatataatttcttttaatggttatacttatcatttattttaaaattgtttgattatagcgagtaagcttctacagtgcagatgtgccgctaattcagcaacctaaacatgtgactttacacaaaagataagaaagcactgttcacaaagggattcctttacaaagggacaactttctgatgaatgtgttgattgtgacaaggatacatctggactcttttcttcctagtaaaataaacttgagactgggtccaaagaatgaataatatgaaaactaatgtcttccatcagcctttagatcctttaggatac

SEQ ID NO: 464 - DNA, 707 bp, Macropus eugenii
  misc_feature (629)..(629): n is a, c, g, or t
ggtgttcaagcctctaacttcccctttattatgggggttagcccttcagggtagttacaacccaaatcctacttgttaccctagcaatacctgagcagatgtcattggtaaagaagtactccaaacacccaatatgcccacttgctgtctccccagatcaatttgtggctgtggcactagacttctaattggtttcccatctcaagtctctccctactcctgtccattcttcagacaactgccaaagtggttttcctaaagtagatctgaccctattccccctgcttcaagaaacctcagtgactacctgttcagtctgagagcaaatataaactccagtatttgacatttaaagactatcaaaacttggccccaacctaccttactagacatgttatatgcttctgttattcatgcactgcacaatccaacaaaattggccttcttgctgttcctcatccttataaaaaacatccaaaatatccaaatatgaatgggatattaaacacccattaagcagaaccatagaaagaaggaggaatgaaactttctgctgagttgaattcagagacaattcacttttggttattgttttcccatggtgtatgatgattgtcttcatgcagaanacatgactcctgaagagctattatgttcactgttatacctatcgtttgttgtaatttgtatttgtgtatgttttatat

SEQ ID NO: 465 - DNA, 702 bp, Macropus eugenii
cccgaatcttctagctgtcatgcgtgtctgccatcgtagctcaaccaacggtgagcattttaaaggtcctactatgtgcaaggcactgtgctaggtcacattcatattgtgctttagaaatatcttcaattacctcttccaaccctcaaaagagcaaaaaatagaaatacaacattcagtctccaaaccctgaagtcacaaaattctgtggcaacgccatacaaacctgtggttggcccaaaggatcttcgttgctgttgaacctttcatttattcactgcagaaccaatgaataggaggtgggataaaccttgcaatgtgttttgctgaaaccctacagagctgctgcccaaagactgcggcaccttggtacagagtcccttggactgagaccaaacttgatgagctggcaatcaatgcatctgacatctgtgacaacacatcgcgccccctcttaaccgctgacctcacccttatttcttccgtcctgccatcccctactccctcctgcctccacgcacacccatgccctgccgccgccaccctcgccccccactccactcacaccactcgtctaagttccctctccccgctcgctcccctccgccctcacctcgcccatactcgaccctcccctcccctctccgctcagctatcccccccctccttctccgcctctcgctcccctcatccctctcctcc

SEQ ID NO: 466 - DNA, 717 bp, Macropus eugenii
gtgtatgtgtgtgttttttaacataacagtagtactttggggcagatgataaaatttataggtacctcaagaaattaagagcctgaatatgctgcattttgtttctttcacttttacatgtagcaatgtgttcgctttcattaccttgtttagtctatgaattgctaactgtgttgcttctaggatccccagaggatgttgcaaggctttttaaaagttcatctggcaggctgtagtatccttttaagtttattcaaatgcagttgctggttcaaagatgtcaccctgcattgtatagtgtagaaaaagacgttttcacacaaaaggacttgagcaagaggatactacaattataaacagacaataatgttcctaatcccttctgctcatgctgctttcttgattcttttctcaatatcatcaagaggttggtagctgttttctaaattcaaaaattaaaaatcacgactattttgagatacacacacacatacatacacacacacacacacacacacacacacacacacacatcatatagctcaacgtttcaaaagagcctttgcaaaacttcaatttgagcaagtagccccaaaggtcaatgctgccattagattgcctcatcagcctagttaaactaaagacctagtttcctacatggtcctccttcaactgtgttccattaaattcaaccaacgttataagtgtctatcatgt

SEQ ID NO: 467 - DNA, 720 bp, Macropus eugenii
  misc_feature (717)..(717): n is a, c, g, or t
gattttccggtggggctgctgagttggttcctggcataggtgccttgtgtaggacctcttgcttctccccatccaggaaaggctagggtacctttccattgaaaggtgctagcttcacaacacacttgatatttcttgtcctctacacctcaccccccactccccatccaggaaaccacatcaatttatattgaactttattctctgcatcaccatatttgtgtcttctttatgtcattctctcatccacccctcttctccaccttgctgaggggtttcttctcttgtccttttctccctctctgaagcacccccctattctgggacatacacctcttaggcttggagtgacccacgtgatggaaacggcatcgcttcttcccttcccctggctctgccaccctgggggcctctgtcctgcagctctctgatctcggggccctcccctagctgggctgggtggagtgcggcgggaatgcggaggggatcgcagcccgcccccctcacccacgcctcctccgctcacctgtcacccgtgtctggctgttttctcgtgctcttatccatcccttgccccacgctgcttttcctgacttagaaggactgagcccctcgcaaaccttgatttgtggcttggggactgcgtattgaccccgaccctgagtccagcagtggggagggggagagaggacgattggcttgttccaccagggccgnaac

SEQ ID NO: 468 - DNA, 704 bp, Macropus eugenii
gagtagaaccgcaccacctaaagggaaggagtcatccccacttgtcccttaagtgaagaggatgtccctgctcccctgggctacctgctggaggtttgggagggtcctagagggagccctactctgttcactcctacaggaagcctttgagggtggttttacgtgctcactccatttggtacctctctagaactctggccagttttctccccaatcaagcttatgtttctcccttgtctccctgtggctttcttgtccagtacacggactgtggtcccagttctcagccagactgggtgaaaacatgggaaagatccatggttttccatgcgatgtttgagggaaacagataaaactagttacattgggagaagactgagtcctgggcctagggatcacagttttagtggtaattaaaaagacaaatgcagtgggaaaggcagagatgtcttccagatacattagttcttctcaggtaacaagcattcagtaaattcagatctgtctccaaatccccttttcagtcaccgcaacaagatatggagattgtcggaggaagcttgtatggacgctcattcactcaattatcaggaccgccccatggcctgtgtttttcatttggtttataggaagcccctagaagtattggggagggcgcaatgtcccatatacccctcatgaaagaaccctgaaatttggggttt

SEQ ID NO: 469 - DNA, 726 bp, Macropus eugenii
  misc_feature (591)..(591): n is a, c, g, or t
gaaaattagattttaattaacctaaaatgtcatttctctaaaatgtatattgtaggttgaaatttgtagaatatcatttgagataattcacttttttaggtaacataacattactcaaattaagactgacttttctttctagttaagctctgtgtggtcatctcttctaaccaaaaggagtgctgaatttaggataattgcaaaactacattgtggtcagagtgcctacactgccatattcattttctttgattttactcaattcaattataagagcaaagaaaacaaagtaacacgttttaaagcgctttgaaagtaaataaaatattgtgggggacagagatgctcatgtcagcatggccttagagtcagcagttacgttacaggtaaaatgttggtgctatacattctttacattgtttacacatgttactgattttgcttatgctccaaagtgtgcatggtgtattttaattagtactttaaagttgtctacaaacctattaccatctagtgtaaatgtgtttgaattcatttatatcacttggaactctgaatttactatttattcagagatggcccagaattcanaccaatacatgcctccacaaaagccatgtaagcgttttaaatgctgaacttaatccattcctatggcttgctgcgcaggatatatgctatgctatataggagccttttgaacacagctaatagttctactatatg

SEQ ID NO: 470 - DNA, 723 bp, Macropus eugenii
caacctcctcacccctaagggttccctggtccttccctttatccttagctccctcctgcttcaaagaaggggaataacagagatcccttaaaactaacttttccaggtgggaaagaataatataagtgtcctaccttcctaaagaggaagaagtctaaggcccagctccctaaattagcatcccctcttgacttcatactagcagattacccctcacataccacctgacaaagtcaaataaatgggtggtaggcagtgggggaattctcatgctgagaaagctctagagaaggtactgttcactcttttcattctgtcatttggggagactgtgcatatagtggggagaattctgggggagatacctcccttcactccattctgtcctttgagaagattgtgcacatagtgggagagagctctagaagaaatagatacctcctttcattctgcattttggggagattggtggggaacacacctccctttattctgtcctttggggaatatcagcccaaatatgccagtaggtctttctcctttgtggattcccacttaagttggggcattgtctcccactgaactcactctcaccctgaagtggattttgtacaggtagcccttggagctcctgaccaaaaaaagaaaaaagtggaggcttctgttggtgtaataaaaggctgattggagccttagaaccattttatatgtttgtgtagaaaa

SEQ ID NO: 471 - DNA, 732 bp, Macropus eugenii
ggtgggtgcagagggtagaacacctggagttaggaagactcatcttcctgaattcaaatctggcctcagacacttattagctatgtgaccctgggcaagtcattgaatcttgtttgccacagttgcctcatctgtaaaatcagttggagaaggaaatggcaaaccaaccactccagtatctttgctaagaaaaccccaaatggggtcacagagagtcggttaggactgaaaaaaaatgattgaacaactgtagtttgagaggtcttagtggtccaatcctacatgcaaaccatagactcaagggcaaggtaagccactgatgtccttaactgctcctcacaggagaatggacttaaaatgctttctcctgagcagcagatgcagacctcagtttcctgttctctttcacatcagtgagtctctcagtgcatttatgcactggtcagaagttgggtatttcctagaatgtaaatttgatgacaattcttttccctgcccaaaatagaaaagccaaatccaagcggtgagagaacacacaggaacaggaagatgtctttaggaaatggttagaagcttttggctttagcccaagagattttttttttttttagtatcaaatcattcgatcagtatcttgacattgtatagtggcttcaggtttaaatagtgctttataaaagactttatctcatttgattctcaccacaagcccctgtggggatagaagttgta

SEQ ID NO: 472 - DNA, 714 bp, Macropus eugenii
  misc_feature (615)..(615): n is a, c, g, or t
  misc_feature (663)..(663): n is a, c, g, or t
  misc_feature (668)..(668): n is a, c, g, or t
  misc_feature (682)..(682): n is a, c, g, or t
ttgaaacgtaatagggagcctgaggcataagccatatgccgcaagttgaagtcacattccaagactgctttcctcaagtaggctttttcagaagttcattaaacattcatgctgaagctgacacaaagaccttgccagaaatgtgaagacacttcaatgggggccccgaggcacgtctcccaaactgagcccatctgaggcagcggctgaggagatggggaaaggccccttcttcctttttaaggaattgccctgtagttaatgttattggggtaagacagacaacagttatattcagtttaaatgagttactaaactgcaggtacagatttccagctgagaagacaggctcctcagagtccagatggagaaccagaagaactggctcctggaggtggccttctcacagcctgtttgttgtgtgtgttgtcagtgaacaggcattattttttttctctctcctcatcgacacatataattttgtccagagaccttgtattgggtgccttgctttttgcacagtgggacagactggagtagagctgtgtactgaaggtggagttgtttactgaagatactaacttttttttccctgtcattgccacttgtgaattntgtcatgtggcttctgctcatggctctttcttgcctctggagacaggncactntgtgcacatagctntccccacagcaccccagggttttcccagtccc

SEQ ID NO: 473 - DNA, 727 bp, Macropus eugenii
  misc_feature (685)..(685): n is a, c, g, or t
ctgggctctttgccaagtggtttacacttcttgcgggtagctgtcttgatccggctttgtccttctgtgttttgtgtttagcacaagccctaaagcaaagactacgactctgtgtctttctatacaagaccttgttagagttcgttagtttcaggtctgtatataaattaatgcagaaagtatctgggaagtttttcatagaaaaatataacttctaagaagggaaattgctaccttctgtgtattacattaattgaaatgtgtttaagggtaaatttttagcatattttagtaatagaacaaaaaaggttgagtattgggccaatggcctggagacaatactatttactaccatgtagatgatctgagctcaaactctctttcccagaattgtaaaataccttgaggtctggggatctgttgtctctctcctatccttgggagatccttaatgcaatgtcagacttgggttgttgcttaagtagttgaacacagtggattctaaatgatggattatttttggataagaaattttggttttttgtgacccatttggattataaaatcttataaattgtagaatatgccttatggacaacctttcagaggtagaataagattatttaatacagtttttaaagagtaaacttcagtgtgtgctgtgtgctggactccactggctcangaccttcttgacttagtgataacagctctaggtgggttctag

SEQ ID NO: 474 - DNA, 706 bp, Macropus eugenii
cccaggccaggctcatccccgcccgcctagtccgcaggcgtttattcagcgttctccgtgcccccaggtgttgtgctagacgacggcgctgtagaaaaggcccccaaagaaaaagaatcccagctccaagaggcgcccccccacccccgcaatctggggtgagcctccgtttcctcttttgtcagaggagaggtggaccagctccagcatcttaggactctacgagcacagcggtaaagaaaggggtcatgtcatgtttgttaatgggaattactgatcccccgagagccaaggctccagggttcttaccacagctgggattctctagcattcctctgcctgagcttctgctatggaagaaacatcttttgagttcctgtgggttgtcttccgttcagttctctgtgaatagcagtcacatccggacgtgtaaatcaatttgctgtcttctgcccactctatctttgagttacattcatgagaatggtgtgtttccaacaccactgtttcctatggaaatgaatgggtaacactctgtgaagtattgctggatttggaattaggagacctgggaatggatcacacatcaaacatttaataactgcgactactggcaagtctctcaacctttcagatattcaagtttcccttctgtaaagtggagatgaatataatgtaaaatttgtaccgtataacgttatgagta

SEQ ID NO: 475 - DNA, 722 bp, Macropus eugenii
  misc_feature (601)..(601): n is a, c, g, or t
  misc_feature (677)..(677): n is a, c, g, or t
  misc_feature (707)..(707): n is a, c, g, or t
ctggtttccaagtaatgagcatgaactggttgagtacctgtgagttgggcacctgtgacttttttcattctacaaatttcaactattgatatattatagaataataattgggctgtgattttatctaagacttgttatggctacacagatatccaaagcatgctgaaatataaagaaaaaaacctaatgctcttgttcctgtgtttgtgacaaagcacacacccccaagaagtaattatttctgatttataacagtgccacagcgagacatagacaaattccatgttctttatagcatatacacacttaacaataactaggtatctggctctcttttcaccaaacccaggctgacagaattgagggcagatattggttctgcagtagtggtatctttggttttctgtagtctatagattacggatattttataatgtcttcagcaaaagatagagcaaggcttgagatactgaatggtgtctgcttcattgaaaaaaaaagtctgtgaaattgtgctttctccattacaaattctaggttttctatgtccttggttcttttatatttacccactaagcaaggagttgtgatgctagcctgngtatttgctggagagcagatgtgaaatgaaaatctcaactttactgaagcatggatttcttctctgtgtgtatggngaagacaatgcacttttatatgtctgtggngtttaaaaggaatga

SEQ ID NO: 476 - DNA, 735 bp, Macropus eugenii
  misc_feature (610)..(610): n is a, c, g, or t
  misc_feature (615)..(615): n is a, c, g, or t
  misc_feature (623)..(624): n is a, c, g, or t
  misc_feature (658)..(658): n is a, c, g, or t
  misc_feature (670)..(670): n is a, c, g, or t
gtcctcaggaaggcagctgggctcctttgcatttcagcctgttttcagttctagtcagacaggaggggttttttttgggaggcattcattgcttttcttccctttaaagcggttcccccgaatttgaactccccccaaactctagttgaatgtccagtttcccctctggctaccttggaatggtggtcacattgtttttttccttagcatgttcagcagtgcttgggacccaggatataagtttatgtcagagaccctgggctcaagaagtcagccatctaacaggggagagatggcatgagctcaatgaccaacatctgggagaacagcttaaaagcaagagatccaggcaaactcttctaacctgggagttggggaaggcattgtgaactagttggcagccatgttgggtttccagggaaagcagagcctcctgccagcgaatgagggcaggaagggtagtccatctgaggtacagcccctaatgcctccgctgaccagcagtggatgtgttgattcctaaagtgggttctctgagtttaagtctgggaatgaattctcgaatgcttgctcagcttattccatgctgatgagatttcttactggcctnccctncacccccnnccccccccaattacgaatgcacttacttatgtanagttgtttgcanaaggagctactctggagaggaaaaccactttcctcagagcaagctccaccagctgctcttgccta

SEQ ID NO: 477 - DNA, 722 bp, Macropus eugenii
ccaatctagagatggtcacttggagatggggacgttattgctgttttatcttgtcttgttggtttggaggagtgggactggaaggagcccgaaaaactaccatttactttttgacactttttgcatagttctcaccttccctcccccccaaactctttctctcacacatagactgttgtaaacatagcccactgatgctgttccccctccttcccatctcacattatcctttgttaaatattgtctttcaactctggatatcacaggaaactgggcctggcatgaaatgctcctaatttactgcctgggtgaccctggccttgtcattccgcagattgaggcctcatcattaagcagaggatagggacagtaatacagtattggggcttgtgagctcctttttggctggggaaatgcaggtcagctcccatgataggagaataacctgtatggcctgagtgaaatgaggattcatatagaactgacccctgatcccaaccatgcctttgttaacagctaggaatttacacagggacagtatcccctcccatttctatgtctgaaggaagacttgacctcagagcgttccttcattcaagacctaacaagtggtgccatttacctgaaggccaaacttctaatgacacatcgatgccattagctatatatgatcttgggcaagtcacgtctcttccttgggactcattctcctgctatatatg

SEQ ID NO: 478 - DNA, 763 bp, Macropus eugenii
  misc_feature (283)..(283): n is a, c, g, or t
  misc_feature (731)..(731): n is a, c, g, or t
gcaagggatttggtaggtgtgtgtcttgttttggtttttttttttttgtttgtttgttttttttaaacaacaaaaaaaactgccctggtcaactctcaaagtatctcaaagattttgatggacagcaaaagccctttcttcggtttcttgatagaaaatccatgtcccagggtatgacagcatttttcacaacattcagtgttgagctgacatggtgactcaggaggctaaggagtatagatagaagtggggggggggggggccccccctccccccccccccncctccccaccctccccccccctccccccccccccccacctccccccccttgcttctctccccccttctcccctctttcccttccccctaccataattctattttacccccttatcctcctcccccacaatagcatcatatactccctcaccctacttcctacccacaattccccccccctcctccccctctctcccctccctccccccaccccacccctaccctctccacccacctgctcctacatctcaaccccacacccccccccgaccgcacttctccctctctacgcaacaccccctccttctcccctcactctccccgctccccctctctcaccctcactactcctcccctcctgtctcttttcctcctccctccacctctctcacctcccaccctctcctccctcccacctcccgccctctcaccgctttgcccccgtaccnacccgcctcccccccaccccaccacctcctct

SEQ ID NO: 479 - DNA, 710 bp, Macropus eugenii
gtttttaaaattatccctcttatatccatttctttgcaacaagtaaccaaaaacagtgtgtgctttgtggtagcctccaacaacgagagggaattgcttttgagataaatgttctggtattgtgttggaggctaaggatgttgcatgtgggtaaattcagtagttagtctgagtcagggggttcatttcattctgttccctggttcttcacaactgtcactgtatttgacacaattgcttgtatttaatgactttcttgttggctttagtgcctatagctgcttccccgtttcaccagtctacaggcctttgttagtagtgggctcagttcacatccagcaccagggtcagttttcttttcttcttttaattttcaaatgcacatttcaattgattagcatagtgcactgagcagtaaatgagatttcagtgaaatcccaaccaggagctcaggagataaagcaaaatgttcagtggcagacccccaattctgtgtaaatttttgcaacccaggttgtatgtatgtgtatacatacatgcatattgtatatatgtgtatacgcagatccaagactggcttttgattttcaaaatggttgaatctgtagtgttaaatgtagttcaaccactattaggaatggaaattaatacaaagagaacagaagggacttcagtcctacttgatgtaactgaggtccttttaactaaaa

SEQ ID NO: 480 - DNA, 716 bp, Macropus eugenii
  misc_feature (249)..(249): n is a, c, g, or t
  misc_feature (342)..(342): n is a, c, g, or t
  misc_feature (472)..(472): n is a, c, g, or t
  misc_feature (489)..(489): n is a, c, g, or t
  misc_feature (555)..(555): n is a, c, g, or t
caaaattgtgacggagttgtgtgctacttaaggggaatttgaccctctcagatatagtagctcttccccaggagctcacagtttcttgtttacattccttttctgtgttcagaaatcactgttaaactcaggggcataattagagtgtaggtgagggggtctttgtggagggatggctttttttctgggcacagaagtgaagatcagagactagctgcagacttcagcgaagctgtgcagctcccagtnattcattttcaaaattaaataatttaatcagcacaagcagtgatgtgatcactttctagaccattaggtctatgcatttgtacaacaggaggnatacattatgtaactggcttgttaattaggatcactgctgtcttacctctccctttctgctgccttgagctgtgtgtgccaaatggtatcatggattacgctggggtaaatggaggggagcagtatatangagtacagtggacccanaacaaccaaggcaagtctgattctgtaatttcccttgctaaaaattgactggagaaaataacacanctgagtatcttctacttctaatcagtggttgctggcacaaggagaaaatctaatttgtattctgcagaccgcaaagggagacatatacctagggcttggcaggagacttgtctgaaagataaaacatcggctctctctcagttaaacttccatcctttttt

SEQ ID NO: 481 - DNA, 708 bp, Macropus eugenii
  misc_feature (365)..(365): n is a, c, g, or t
  misc_feature (394)..(394): n is a, c, g, or t
  misc_feature (406)..(406): n is a, c, g, or t
  misc_feature (521)..(521): n is a, c, g, or t
  misc_feature (585)..(585): n is a, c, g, or t
  misc_feature (603)..(603): n is a, c, g, or t
aaaaaacaagtgttggcatattatctttttgttttgctttgcctgtgacacatttggaggggagaggggtgtcccacttgtggtcttgggtcatgtcctaccatcctcagggccagagtggaaatacctctttgccagggttgtgtgtcttgcatctgtgaaaagaacagcttaaaatttatagtctgttacctctaaaagaggaacattaaacaagtgatcctaagggagagctccttgaactgtgcaagcagatgaacacctgcaggccccttcagaggctgaagggttgtattccctacgcctcacaccttttattactgattctggtgattggaatgttgtggtttaaactcttccttttnctcccattgttccccgttcatacttcccnaaaataatcttnataacaagaagtgagctttctgggggtccatttctcttgacttcttgtcctccacttgtggcattttaacagcttctaaggaagtttggtttaatctcttggaatgggaacaatnctgaaacctggatgtggaaggaattgcaagctctgcgctttttttttttttttacttttttttnaggcttattccttttctncctggctttctcccttgtcctaggcttgtccttttgttggcaagacctttggctaaattcattgtgtaaagaaatggggactgattaaaaaagatcatgaagggc

SEQ ID NO: 482 - DNA, 717 bp, Macropus eugenii
  misc_feature (627)..(627): n is a, c, g, or t
tcagaatgcactttgatagggctactgctggcttccggtcttgctctgcttgagatattcctcattttgagatgctgtttagtgcaactgaaatgaaggaggggtgagggaccacccaagctgaaggtgtgtctgaaaatgagactggcacctttgggggtttgctagactaaggcaactgaagataagatcacaaaaatgacagaaacattccctatattcttaactttatggagctgcataatggtgaaccaagtttgaactgagatttagggcttattttagatacatggattcttacattttaccatcaatggattttatcttcaagcattactttttgttcaactttgtatattcatgtgaaattaaatatcatgcactaaatgttttgcccttctttgctattatgtagccaaggtgttcataggcaccattctgaataatttgccctcgtaaatggtgtgggtcagggaaaaataggtatttttttcttgctcaatttacctaagtaagttgttttccagtgttatattaatttatttctgcctcctgtttctgcataactgaagtatttgctgtatccatgtagttttcatttgtgttgctaatacctagttttaattntaaataatctgtactttcatttttttaaaatgtaaccaacccaagcactttaagcaataatttcatcatgtgaaaaattcaatcagttta

SEQ ID NO: 483 - DNA, 689 bp, Macropus eugenii
cacagattcagcaacagtgtattaatgcacctgttttcccatagtccttccagcatctcatgtctttttctttgtcagctttgccaatccaatgggtatgaggtagaactggattgagatattttgaacaaaaaaaaaaacaaactaaaacttggaaaattttgtatgaactgatgaagaatgaaagagcagtaccaggggaacaatctacccattgaccaccataatataaaggaaaatgattttgaaagacttcagaactctaatcaatacagcaatgaattttgatttgggaatacataatgaagcctactttctacctctcaactgagattctggactagagatgcacattgaggtatatgttttcagatatggccaaagtattgattacaattgctctcatatatatctgtacaagagaaggtcctttaagaagggaaaggagagtcgctggaaattgacaatgacagaaaaagaaagtatcaataaaacatttctttaaatacctaagatcccagaggcaaggtaggatatgcattaacatttttttgatgatactcttttgtttttatatcaaagctgttttaaaaaatatctctccctagcctaaatgagccctctcatgtgacaaaaacagttaaagccaacagacataggaactatgccctagtatgtgtaatacccag

SEQ ID NO: 484 - DNA, 724 bp, Macropus eugenii
ccaaatcttatgactgaagttcctctcaattcatttctttctataaggatatctcaagccttttttatgagatggagttatacttttccttcccctgaaggcttgaaatcacctagggacagagatcaaggaagaaggggaaaagtgtaacaggaggtatgctgataacaaaggtcatagaacaagtaggggagaccaccaaaggtggaaaacaagcggaggtaagggaaaagtgaaaggattggaaacattgcttgaaaaggtcagagcaagggagaagctgttactactaactgtactcccctctcccctgggaatcccagcaaacatcaaagtttggggaggcatgatggaaaaaaaacagcttagagtcccactagcctcagaaagccttcagtatctactagccaatccaaatctgatagctggaaagcccttgccctggatagtgtattcctgaaagttacagtggacattccaaagtactacttggaattctgactgacttttagcagcagtgatctctcccacccttatctgatgatacaaaatgttatgtgttctttttctttttcagtcaggtctgcattttgggaaaaaaaaacaaacatgctaacatactgacttgaagcacaggcttttatgaatggtacacattgttaataaaaaggctaggggatgtcagtcaaataaaaatatatatgtacatcagttggtgaacact

SEQ ID NO: 485 - DNA, 792 bp, Macropus eugenii
  misc_feature (31)..(31): n is a, c, g, or t
  misc_feature (693)..(693): n is a, c, g, or t
  misc_feature (741)..(741): n is a, c, g, or t
cctttatgtgaaactagcaggctggttccgngtccggactcccgggatgcaatacaaaaagaagaatctgtgagtcaggtggccagaggatgcctgtggccattcctggtggtcactgttattaggatcataggaaaatatatttagaattgaaagtcactttatcctaccccttaattttatagatgaggaaacaggatcaaagagtgatttgcccaaggcaagccaggtattaagtactgaaattttaatccaggacctctgattccgaatctagtgctctttcctctcccccatctcaaacaaaagtggaataccaccctccctttataagatttgttgttcttgaggaggtcccttagctcaattcagaaaccaagaaaaatttaccatccttttcccttttacttactagctaaagacatagagagacttctctttttcaatgtagttttctttaaaatgttttattagtaatacatattatatattaatgattacattgccttcgcttgcagatgaattcttctcactccccaccctcaccccccagaacatcatctcctgtagcaaagaataggttataaaaggtggggggaaaaaggaaggctggccaagctaacagatgcatcactaagtctaaaagtatgtgcaatattatatacttgcaaagaaggaaagttaagtgcattntctcatcttttcttctgggtcgaacttggtcattctaattacctagtngtcaggaatcactgtgtctatcacttatttcactccacagcagtattccca

SEQ ID NO: 486 - DNA, 745 bp, Macropus eugenii
gtcatggattaaaatcctccaacaacttggttgtcctctagattctttctagattatttgtgtccttctcaaactgttttttcctaggagtagtggaatgggactgtgttttggtctttttgttcaggaaaatggattcttggggattatcccctcattccctaaggcctcagtttccttacctataaaatgacctttgatgtctctcccagctcagtgatcgaattgatctatgcctcagttaattcggttagccatagttgttgaaaggaataaccttggatcatgagatccataagtgatcctaaatcctcattttaggtgagtttcaatcttccctaccaaactcctaacagaatggaacagaagagataggaattctcttttctctctctgtcctgtcacctgaacaaacagggatcataggatactagaactagagctggagggactctggaagtcatccagccaagcccgcttgtttcacaaaagaggaaactggattccagaggtttaagtagttgcttatggttccacaactggtaagtggctggctcaggattggaacccaggtcctccactctacattgcacaatgttgatttggggattttgggaatgtggaaaggaactaaaagatgacaagaaaagccaggagtctttatatactatatatatatatatgatctaatatattagatcaacagtcagtccctgtgccattgaaaactgcctgcatctctaca

SEQ ID NO: 487 - DNA, 727 bp, Macropus eugenii
gagaccacattttaacataaatttgcctagtcttactccagcaaatttcattagtgttaattagggagttgggtcctgctggttacatgcgtcaccaagaggtaaaaataataggtcatcacaaaggaatacattccacaagtttttagaatcacataggttaacaacactgtgtcattttaaagtttaaaataaatgttttggaatgtgaaaagcttttacattcccatagtattaacaattcaccgtcttagatgatgctggcagcagtatttgcctaacagaattccaagggtattactgacatgacatttttgtaaaacgatcttaacccagaatagtatcaagttagcaccacaaaacttaggccgtaatacgaagggttcagaagtatgaggaggaacacaggtcagaaagaaaggaatcactccaactatggctcctcaaaaatcacagtctgggaaactatagtttttgagggaacatttttctcacatttcattttctagtttaactgtcccctgcctcagttttctaaaactctgataattctgacacacgataagtagactatctatacaaagagatgttctggaaatttttttctccagagttttcacagaattatgcatggaccaaaaacagggagggagggacctcacagatcctcactttacctacgaaaaacacaagactcaggggaaggcgcttgtctgatggcacacag

SEQ ID NO: 488 - DNA, 745 bp, Macropus eugenii
  misc_feature (711)..(711): n is a, c, g, or t
ctcctttctgtcctccccagtccctttttccatctgagggcagaggtttctaagctaaatctgtttcctttggtgaagttgttccttggtgattcatcaggattccagattcgattctctccaaataaagataatttccatttttttctgaccaccttcctctgggctagaaaggggcttggctaaagaagaagccagtggctatttgacaatgcagaacatacctccatcctggaaagtagatcaagactagggaattgataggtgggctttcattatttttattaataattttttaaaaggttgtgtaacttcccaaaaggcaaagttgtttaaactgcccctaattgacctgggtcactcgaatataggtacctgagggggtaagaaactgctgcctttctctttaacccactccctactccacttgcactagaagggtgtagggaggaccagagggtggagcggaagtgggaccctggccaagccaggaggctggacacaagcctgttctgggagattcaggggcttctttctattgtcaaggggcaagtactgctctgccaaggtcagccctcccctgtgacatctgctggctacaggaagtcatctccagtcatcttaatctatatcttgctgctagacccagatggctctggaggagaaagtgagactggtgactttgcacagccctccttatttaaatcccanttcacttgcagtcatagcaccatgacatcatggt

SEQ ID NO: 489 - DNA, 782 bp, Macropus eugenii
  misc_feature (647)..(647): n is a, c, g, or t
ctgatatgaagtaggtttccaccattataaaatgaaaaggattaaaatggtcctcccttgaataattaatattggactgaaatgcttatgtagtaaatcttgaaaagaatgtttttcaaggtttcttggaactccttgtttataaaaattctggaaggatagccagactttactttctgatcagctttgcgtttccccgtccctgccatccccagaaaacaaaacaaataaaaatagtcattcggtacagttcctctggtgtcctgacaaacttgaattctattaccccaaacttgaagaagggatgtttggaggttttcaggaaacaagctttggctgtaaaatgccatgaaagtccatattttgggatagaagttgaaacgtgatttgtggacctccactcatcagatgtgtccaatgtgaaaatgtgaattgaatctaagagtccgtgctgaaataaagcaccttaccagttatctgttagcatctttcatacctactctgcctcttagtgttctcagctcttcttttgtctgccactagtttgacatatagttttgttttcataggcaaaccttcacacgctagaatcaggaaaatgattcatatcacatatctttaatagaagcatgaatgcagaaacatgntgcactatgccatttgggtgggtatgtttttcttgcccttatattttaaaaaaaaaaggaaaataccttcaaaaactgacccttaaaaagagtaaaagggaatataacatttccaacttacacagcatatagcag

SEQ ID NO: 490 - DNA, 778 bp, Macropus eugenii
  misc_feature (553)..(553): n is a, c, g, or t
ccagaatgagggggatctgagtttccctgtactccatgattctgttcagaccacatctacagaactcgatacagcggccacatctaggaaggacactgggaaactttggagttaatccaaaggaggccagatggctgtgaaggcagatggagtaacctgctgtgtctggagccattcaagcgttccatgagtgtgccatgtggatgagggggaagaagcatgatagataggacctgaacatggcgtcacttggacatgctcaatacactagaccgtttgcttggctggtgtcctccactcattctccaggcatcagatgttcatcttaaacaaactggtcatttgtacggacatcattaagctttcagcgcacacttctctccactgccagggcccatgctcggcagtgacagactgcacatggggctgggtttgaggtcagagggagcttaatgagttctccaatgggtcccctctttcaattacatgaagcatttgctctcagctgtgagacacagggagagaatactgaccttggaggcaggagacctgngtgtaagccctggtttccttgctctgagtatgggcaagcaatttcatttatccttgccttagttttcctcattgtctttggatcagagatttaaagttggaaagagccttggaaagccactgagtccaccatccttattttacatttagggaaactaagtacagagcatttaagtcattttctcaggttccacaactagtaagtgtttgaagccagatttgacct

SEQ ID NO: 491 - DNA, 775 bp, Macropus eugenii
  misc_feature (737)..(737): n is a, c, g, or t
gaaaatactagcatttctatctctattcaattaacaaataagttaaactttactaatattttacttttggatggattctggtgccctcagtctgtatgtcagataattacctatcagtatggttttctgaaggaagaattagaataccagattctagggacattcacagtgttaccttcaaccatccgtttgctttcaacatattattgtgttatgatttatatattcctgggtaagtgaatttctagataatattatgtagtcttaattgaactaacattcacaaaatgaacaagtggcttcagaggattcctaccaaaaaaaaaaaatcctcagattgaagataacactaatactatgagaaacaataaactaaaaggaaatggcagagccagtacctccgactcttagtacagaactctgtcatgttgcaagttaaaaactatgatgagctattcagatgtgatacattgggcaaaaacatttcctaattatctgaaatatggatttacatcccctataattaatgatgaacctttccctatatgataggagccttcattagcccctaaagctctgccacattggtgaggctagctttttatatggctctgctccatttagaagaggctaatttttcattaagaggtattgaatatatactcaagactttgggcccatggcccattgacccatgtactgagactcaaaacattgacttagctttctggtggtcntaatgtaaactctgcacgcaatgatcagagcttctctt

SEQ ID NO: 492 - DNA, 231 bp, Macropus eugenii
gctgccagtgcctcgggaacagcctcgttgccagctttggtctctcccagttcaagagtttgatttcacaagctgtcccttaacatcatttggtcaccaggtcaacagaacagagtgctacccatggtctcactgatgctctcacccagattccttttatgtcaatttgtttataaagaagaaataaaaaaaaaaaaccaagaaaaaaaaaaaaataaaaaaaaaaaaaag

SEQ ID NO: 493 - DNA, 784 bp, Macropus eugenii
  misc_feature (457)..(457): n is a, c, g, or t
  misc_feature (580)..(580): n is a, c, g, or t
  misc_feature (601)..(601): n is a, c, g, or t
  misc_feature (657)..(657): n is a, c, g, or t
  misc_feature (695)..(695): n is a, c, g, or t
  misc_feature (708)..(708): n is a, c, g, or t
  misc_feature (712)..(713): n is a, c, g, or t
  misc_feature (741)..(741): n is a, c, g, or t
gccaggggcaggaaaaggtggaagaagcgagaacagaagcgtcaagctcatctctgtgggagatgaagggcctccctaccccctccctagtcctcaggaaggcagctgggctcctttgcatttcagcctgttttcagttctagtcagacaggaggggttttttttgggaggcattcattgcttttcttccctttaaagcggttcccccgaatttgaactccccccaaactctagttgaatgtccagtttcccctctggctaccttggaatggtggtcacattgtttttttccttagcatgttcagcagtgcttgggacccaggatataagtttatgtcagagaccctgggctcaagaagtcagccatctaacaggggagagatggcatgagctcaatgaccaacatctgggagaacagcttaaaagcaagagatccaggcaaactcttctaacctgngagttggggaaggcattgtgaactagttggcagccatgttgggtttccagggaaagcagagcctcctgccagcgaatgagggcaggaagggtagtccatctgaggtacagcccctaatgcctncgctgaccagcagtggatgtngtgattcctaaagtgggttctctgagtttaagtctgggaatgaatctcgaatgctngctcagcttattccatgctgatgagatttcttactggnccctccctcaccncccnnccattacgaatgcacttacttatgtaangttgtttgcaaaaggagctactctggagaggaaaaccactttt

SEQ ID NO: 494 - DNA, 761 bp, Macropus eugenii
gttatgcagttgtttcaataatgtctgattcttcatgaccccatttggggtttttgtgcaaagatacttactggaatgatttgccatttccttctctagctcatgtcacagatgaagagactacggcaagcagggttaagtgacttgccataggtcacaccgccagtaagtttctgaggctagatttgaactcaggtctcccagactccaggctcagtgcttttgttatccgctatttcacctagctgccctagacatagctgtaatatatgatattaaaagataaatacattacaattacacaaggaggaaaagttgttaaggtaaaatgaggaagatttcaagagggaaatcacatttacttgagctttaaaggacgcctaagacttaaagtcttaaagagaaggaggacattccagccagatgatacagagtgagaattttatgaatgttccaccaccagtgccatagataattgagaattgattccataatgttgtctcagaatgttccataagatctctcaaaaacagtctttctacaatacatgaatatcagaacataattcagagttaaacccataatataaccatgtctctaatgaagatgtgagaattatagaccactttccacatattttaaacagacatcacataattctgtctgaatcccttagccagaggtatagcagtagaagcagagatctggaatcatctgttaggcttgttttttttttatgttccagcttttctagctaaagg

SEQ ID NO: 495 - DNA, 760 bp, Macropus eugenii
ggaatgtttccaatccatttgacatctctggtctgaactgcacaattattttagccttaacatatattgtactttatactgctttctcttttctgtgctagttttatctttacttagactctgtgctccttgtgatagaagagactgggttttctcctctcccatctcacacaacccctaggacaaagctacgcagagagtttgagctctttcaactgggttgcaaaaagacactgacatcaagaaaggaggaagattccaccctagagagtctagtctgcgcctccatgggactttgggagggatgtgaggcccaggacaaaaaaaaggacccagggaggaataagaggacagagttaagtcctgcagtatccgccaattcctttaagagctgggcaccatgatggctgggtatcctagggaggaaacacaccatccccctccctagggcaaacccaggttgctccaccctaattacagctcttgagagttggtacccaatgcttgttgaactagtttttttatccactcaaaaaaatggtcactagagttcttttttccaaaggtgtttgatttcatactttttcttccccaggcatgacaagtcggcttcttggtccctcgttttgacctttattgctgcctgaattgaccagatatgactgtgaggtttacgtccctgtcccccgcagcttcacgctcctgcaagggagtgatttgctcagagccctgaccaggccacttgaccagggccagcggt

SEQ ID NO: 496 - DNA, 744 bp, Macropus eugenii
  misc_feature (612)..(612): n is a, c, g, or t
  misc_feature (635)..(635): n is a, c, g, or t
  misc_feature (733)..(733): n is a, c, g, or t
atttggtttggattttacctagtatgtatgtagcttgtgtttagcctcattgtaaaggaaattgtatagtacaaaaagctcttgtataatagtcaatgctgtactcttctgaggagtgatttttttttttacagtgcaatatggttaagttgctttttttctctcatactattggcacagtttaattacaatggtcacatcttgaaaatagttcaccacaatagaatcctgtctgaaatcctggaatctgttatttctgccctcaagcagttttcatattaaggtcttaaatagcttatatattgaatatcagtcttgctaaactgcaaatatagacctctacttaatgaccttgaaattcttttcggtttaatttagaatattttcaatactattcatactggttaagcctgaagaggcccaatgagagagaagatttaatatttatgaaatcaataggtcatactttctttaggttttgctgggggaagatgaataatttgttactttggtatttgaacctctaagagtagacttgatgtaaatgtggaattagtattggtccttcctttttatctagctaacatttgaattaaagaggggagagaaatntaattcaaaatgtttttcagggntgtacaattcaatttagaattcattcatttcaacttacaaaaggcaagtcctggtggaaacacagtcttttgtttatgaatgatccatagctggaccntctcatcagca

SEQ ID NO: 497 - DNA, 750 bp, Macropus eugenii
  misc_feature (635)..(635): n is a, c, g, or t
  misc_feature (683)..(683): n is a, c, g, or t
gggaggtagggagacaaagaagctcaggggtatgactggctcacccctagggtggggcaatgggagggggaataaaggagattgcctctccataccagggcctttctaagcctctgactgactagctgagaccagagcccacagctgggcacccttggagtcctctgtattctcaagtgccaacactgccctaggcttggaggggaccttgaccttggcccccaacacagccgactctgtagaatgtagagacccatgaacagggctcctaggggttccctccctcaggatgccacctcagatcaagtatctcttagttctggggatgggatgggggctaggctccccctgcctccaatggtagtctcccctggaggaagtccatgaagggcccacccccctcaggacctgcctgcccttagcatgcttactcttaccctgcacccagtttcctcctccattttccgcccatctgcaggagccaggtcctgttaggtgggaggggcatagtgagggtgcatttgccatttggagccttgtgaagttcctctgtgggcctgctgtgtcatttactagaaaaaaatgggaaaatacccctttcttaggagaagaatgctgtcccaggcctgaccctnctcgtctgcccccagactctgcactgcctgtttgaggacctgtctgtnccatcatccccttgtgtgctgtgggccccacagctcatgctgtatgcgtgtgcagtgcatccatgat

SEQ ID NO: 498 - DNA, 754 bp, Macropus eugenii
  misc_feature (665)..(665): n is a, c, g, or t
  misc_feature (684)..(684): n is a, c, g, or t
caacgatcctgccccatcaacgtactttagaataccaaggccaatttctacaggtttttaatgacaactttagcttcaataacttttaacactaatgttacagcactatttaactggactcaatgctctctacagaatatgtatactctaatacaaaaggagaatgcactgcgtttattgttgagtggagaccctgatctttggaaaacttaattcccttcctataattattggaaatctcagcagcaaactcaatctaagtgcacctctatgtggtgtactgggactatgtattactataatgtacaacattgcactaccatgtgtcagtaccatgtaattccttttatattgcatcattactttgctttgccacatttatatggaaactacattgatcaagctaatgtaactcatactttagaagattgtactttaactaatagtggaatggtgtgtgggatgatgaccagacagatggagccctgtcttctctcacactcctctaatctacatgatcttactctatatcctatgtccaatttctctatgttacatgaagtatctgttcaatctatctgcctcgtctctacaatcaaactgacttgtattctgtagggcaagtagccccatttgctgggtgtatacaacatgtgagttttctncattggcaggatgatgatntctacttttcccctgatagtggatgatgttattttgtcttgggcacccaaactattacgtctaccctacg

SEQ ID NO: 499 - DNA, 775 bp, Macropus eugenii
  misc_feature (504)..(504): n is a, c, g, or t
gttctcgggcgcttctgtcagtcactgccagcacctcccttcattcattcattcattcattcttaggattccaagcctccgaagctggagaggaccacagaggccacccagcccatcccatagccaaaccagaatcctcgtaccccccaccgaggcgctcaagcattagcttagagacttccacttaggggagcactggcagaccattcctcatgctcactcctttagcaaacgtggatgaggcccctactgcttaaagggtcttgattgggcggggcattggggagaagagagtaaagatcgaataagaaacaaagaaacaactctggccctccgcgagggagggagtagcgaggaatggaaccctaaccttggtcactttcatgtgtaattgacatgagcgcacctggatcctgaagcctcgggcggcccctgttaccgtccttgaggagagcagccctcgcgcagaaggggccccgcgctccccggcagcaccaccaccgncactgccaccaccaaccacagaggagctgccacccttccggaagccaaaatggaagtaaaagatctgattataacctgtgaaaataagatgcagacagagcttgaccctatctacccccagctgatgaaacggtgtagccttctatcctccctggatctccccaggagaatgccccctgatctgctcaagcagggagagggccccagattccccaagggagctcagccggcacttcccagctagaagatatagattatgcccagatatacc

SEQ ID NO: 500 - DNA, 756 bp, Macropus eugenii
gttggggtaggggtgggagagggcagcttgctttctttatgggttctaagaataaacaggcctgggtagaaggttcagactggtttggaaacccagacttctgagctgttcatcccagtaggaaagaaatagatagaaatgtccatgtttagtttagatctgctggcctgtgtgggcctacccttaagggaggtctgtggggtattttaatcccaaaagacatcgcaaaataaatacaatgaaaacagcttgtctcttctaaaaatgttcagtggagatccatactctgaccctgcacaagaccaggtggagtcctggcatctttcttgactgtcggggaaggaacgctatcagaagaggacaaagctcaaagcaaagaaatctatttagaaacaaacaattaaaaatggacttaggactgacgagagcctgaatttccattactccttgctttgtggacaggctaacaagttcctctgggtgccttctgtgggttctaatcagtattgagggggagtctgcctccacttccctacttgctgctttctttacagcctctctgattagagagagcagctggtgggagagccgagacccagacccagcaggagaattgacaatttgtaggactgcgtttctgtgcttcagtttagaaaaaaaaaatttttttgtttttttctggcgggcttcttgttacgggcccgcatggcaggtggaagtaatttgaatgtatttgatttacgtgttgtttgcttt

SEQ ID NO: 501 - DNA, 465 bp, Macropus eugenii
gcccaagggggctgccaagaagaaagcaaagtctgccgccgcaggcaagctcacaaaggggaaataaagccctgcccttccctctccactggcatgcctttggggtcttgtggttagggctgggggagttgccgtttccttgtctatgatgtgggtcagctcagtggatgtccatctcagggagcttgtcagggaacagccaggactggctcttgagttgtcactaccttggcagtggggcctgatgccatgcaatggggcctgccaagaggattcaaaagtgtccctatccccctaagtctgggatgaggcagaagccaccatgtttgtacttgttctcctggcccgagaatctcaccaacctgggtcctcgggacaagatagttgttttcatgtttgcttaagcttcttagaaaatgttaataaagttgttagatgctacaaaaaaaaaaaaaaaaaaaaaag

SEQ ID NO: 502 - DNA, 758 bp, Macropus eugenii
  misc_feature (538)..(538): n is a, c, g, or t
  misc_feature (567)..(567): n is a, c, g, or t
cccagctccttcctcagccaagcgtcagagctaaggaaggatgagaatagtctcatttttgatggttgtcatatcccactccctttggcccctgtcctgttcacctcccacagcctcatccagccacattcctgtcctggtacttagcaaactttaaaacaagactatctagaaaatttgaaagatctcaagccaggctttcctgttcctgttccccagtcagggtccaccgatactttcgctcctaaggcacctttatcagaagcagaagccagctgttagtgaggctctcacctataatacctgatcctaccaggctatactttcagtcatgaccatccattcttcccaagcaaaatgcttctagaggtttgagttgtcttgagttactaccaatccatatttccccggtctctctacagcagatgagaacatcaccatctagtgatgctgcccactaggcttctggccacattaccctgccctgccctgctcagagagatgtggcattgtccaccttcaatggcagagatgattntttaatggttcttgaaggagaagcagagnccctgcatgcaatgtgtcaaggagcccttgacagagtgaggacacagcagggaggttaagctaaagatgaggattatcctgcgctcttggctctctctggaatcaaaggtaactgtcctgcttgtacactcagacatctgctctcgataattatggactcctctagttcagttgccaaataaaatttcatt
